(19) United States
(12) Patent Application Publication
(10) Pub. No.: US 2025/0264476 A1
(43) Pub. Date: Aug. 21, 2025

(54) AMINO ACID-SPECIFIC BINDER AND SELECTIVELY IDENTIFYING AN AMINO ACID

(71) Applicant: Government of the United States of America, as represented by the Secretary of Commerce, Gaithersburg, MD (US)

(72) Inventors: Zvi Kelman, Gaithersburg, MD (US); John Paul Marino, Silver Spring, MD (US); Nicholas William Callahan, Gaithersburg, MD (US)

(21) Appl. No.: 18/559,515

(22) PCT Filed: May 9, 2022
(86) PCT No.: PCT/US2022/028400

§ 371 Date: Nov. 7, 2023

Related U.S. Application Data
(60) Provisional application No. 63/185,483, filed on May 7, 2021.

(51) Int. Cl. G01N 33/68; C07K 14/195; G01N 33/58

(52) U.S. Cl. CPC G01N 33/6842; C07K 14/195; G01N 33/582; G01N 33/6824

(57) ABSTRACT

N-terminal amino acid binding (NAAB) reagents are a tool for parallel, high-throughput proteomics. A fluorescently-labeled NAAB allows immobilized peptides to be identified by their N-terminal residues using single-molecule fluorescent microscopy, which enables novel proteomic analysis, like fluorescence-based next-generation protein sequence. Amino acid-specific binders are presented which bind to leucine at the N-terminus of peptides/polypeptides/proteins with high affinity and specificity, allowing detection of an N-terminal leucine with high confidence.

### CROSS REFERENCE TO RELATED APPLICATIONS

[0001] This application claims the benefit of U.S. Provisional Patent Application Ser. No. 63/185,483 (filed May 7, 2021), which is herein incorporated by reference in its entirety.

### STATEMENT REGARDING FEDERALLY SPONSORED RESEARCH

[0002] This invention was made with United Stated Government support from the National Institute of Standards and Technology (NIST), an agency of the United Stated Department of Commerce. The Government has certain rights to this invention.

### BRIEF DESCRIPTION

[0003] Disclosed is an amino acid-specific binder for selectively binding to an amino acid in an analyte, the amino acid-specific binder comprising:
[0004] a first amino acid sequence comprising

(Sequence ID No. 1)
ASVVPQEGQQVTRKHYPNYKVIVLNDDFNTFQHVVACLKKYIPNMISDRA
WELTNQVHYGGRAIVWVGPQEQAELYHEQLLRAGLTMAPLEPE;

[0005] a second amino acid sequence comprising

(Sequence ID No. 2)
ASVVPQERQQDTRKHYPNYKVIVLNDDFNTFRHVAACLMKYIPNMTSDRA
WELTNQVHYEGQAIVWVGPQEQAELYHEQLLRAGLTMAPLEPE;

[0006] a third amino acid sequence comprising

(Sequence ID No. 3)
ASVVPQERQQVARKHYPNYKVIVLNDDFNTFRHVAACLMKYIPNMTSDRA
WELTNQVHYEGQAIVWVGPQVQAELYHEQLLRAGLTMAPLEPG;

[0007] a fourth amino acid sequence comprising

(Sequence ID No. 4)
ASVVPQERQQDTRKHYPNYKVIVLNDDENTFRHVAACLMKYIPNKTSDRA
WELTNQVHYEGQAIVWVGPQEQAELYHEQLLRAGLTMAPLEPE;

[0008] a fifth amino acid sequence comprising

(Sequence ID No. 5)
ASVVPQERQQVTRKHYPNYKVIVLNDDFNTFRHVAACLMKYIPNMTSDRA
WELTNQVHYKGQAIVWVGPQEQAELNHEQLLRAGLTMAPLEPE;

[0009] a sixth amino acid sequence comprising

(Sequence ID No. 6)
ASVVPQERQQVARKHYPNYKVIVLNDDFNTFRHVAACLMKYIPNMTSDR
AWELTNQVHYEGQAIVWVGPQEQAELYHEQLLRAGLTMAPLEPE;

[0010] a seventh amino acid sequence comprising

(Sequence ID No. 7)
ASVVPQERQQDTRKHYPNYKVIVLNDDFNTFRHVAACLMKYIPNMTSDR
AWELTNQVHYKGQAIVWVGPQVQAELYHEQLLRAGLTMAPLEPG;

[0011] an eighth amino acid sequence comprising

(Sequence ID No. 8)
ASVVPQERQQDTRKHYPNYKVIVLNDDFNTFRHVAACLMKYIPNMTSDR
AWELTNQVHYEGQAIVWVGPQVQAELYHEQLLRAGLTMAPLEPG;

[0012] a ninth amino acid sequence comprising

(Sequence ID No. 9)
ASVVPQEGQQVTRKHYPNYKVIVLNDDFNTFQHVVACLKKYIPNMISDR
AWELTNQVHYGGRAIVWVGPQEQAELNHEQLLRAGLTMAPLEPE;

[0013] a tenth amino acid sequence comprising, or

(Sequence ID No. 10)
ASVVPQERQQVARKHYPNYKVIVLNDDFNTFRHVAACLMKYIPNMTSDR
AWELTNQVHYEGQAIVWVGPQVQAELNHEQLLRAGLTMAPLEPE.

[0014] Disclosed is an amino acid-specific binder for selectively binding to an amino acid in an analyte, the amino acid-specific binder comprising an amino acid sequence with a homology of at least 30% compared to an amino acid sequence comprising:
[0015] a first amino acid sequence comprising

(Sequence ID No. 1)
ASVVPQEGQQVTRKHYPNYKVIVLNDDFNTFQHVVACLKKYIPNMISDR
AWELTNQVHYGGRAIVWVGPQEQAELYHEQLLRAGLTMAPLEPE;

[0016] a second amino acid sequence comprising

(Sequence ID No. 2)
ASVVPQERQQDTRKHYPNYKVIVLNDDFNTFRHVAACLMKYIPNMTSDR
AWELTNQVHYEGQAIVWVGPQEQAELYHEQLLRAGLTMAPLEPE;

[0017] a third amino acid sequence comprising

(Sequence ID No. 3)
ASVVPQERQQVARKHYPNYKVIVLNDDFNTFRHVAACLMKYIPNMTSDR
AWELTNQVHYEGQAIVWVGPQVQAELYHEQLLRAGLTMAPLEPG;

[0018] a fourth amino acid sequence comprising

(Sequence ID No. 4)
ASVVPQERQQDTRKHYPNYKVIVLNDDFNTFRHVAACLMKYIPNKTSDR
AWELTNQVHYEGQAIVWVGPQEQAELYHEQLLRAGLTMAPLEPE;

[0019] a fifth amino acid sequence comprising

(Sequence ID No. 5)
ASVVPQERQQVTRKHYPNYKVIVLNDDFNTFRHVAACLMKYIPNMTSDR
AWELTNQVHYKGQAIVWVGPQEQAELNHEQLLRAGLTMAPLEPE;

[0020] a sixth amino acid sequence comprising

(Sequence ID No. 6)
ASVVPQERQQVARKHYPNYKVIVLNDDFNTFRHVAACLMKYIPNMTSDR
AWELTNQVHYEGQAIVWVGPQEQAELYHEQLLRAGLTMAPLEPE;

[0021] a seventh amino acid sequence comprising

(Sequence ID No. 7)
ASVVPQERQQDTRKHYPNYKVIVLNDDFNTFRHVAACLMKYIPNMTSDR
AWELTNQVHYKGQAIVWVGPQVQAELYHEQLLRAGLTMAPLEPG;

[0022] an eighth amino acid sequence comprising

(Sequence ID No. 8)
ASVVPQERQQDTRKHYPNYKVIVLNDDFNTFRHVAACLMKYIPNMTSDR
AWELTNQVHYEGQAIVWVGPQVQAELYHEQLLRAGLTMAPLEPG;

[0023] a ninth amino acid sequence comprising

(Sequence ID No. 9)
ASVVPQEGQQVTRKHYPNYKVIVLNDDFNTFQHVVACLKKYIPNMISDR
AWELTNQVHYGGRAIVWVGPQEQAELNHEQLLRAGLTMAPLEPE;

[0024] a tenth amino acid sequence comprising, or

(Sequence ID No. 10)
ASVVPQERQQVARKHYPNYKVIVLNDDFNTFRHVAACLMKYIPNMTSDR
AWELTNQVHYEGQAIVWVGPQVQAELNHEQLLRAGLTMAPLEPE.

[0025] Disclosed is a binder complex for selectively identifying an amino acid, the binder complex comprising: an amino acid-specific binder, and an adjunct attached to the amino acid-specific binder, wherein the amino acid-specific binder binds selectively to a binding amino acid, and the amino acid-specific binder comprises:
[0026] a first amino acid sequence comprising

(Sequence ID No. 1)
ASVVPQEGQQVTRKHYPNYKVIVLNDDFNTFQHVVACLKKYIPNMISDR
AWELTNQVHYGGRAIVWVGPQEQAELYHEQLLRAGLTMAPLEPE;

[0027] a second amino acid sequence comprising

(Sequence ID No. 2)
ASVVPQERQQDTRKHYPNYKVIVLNDDFNTFRHVAACLMKYIPNMTSDR
AWELTNQVHYEGQAIVWVGPQEQAELYHEQLLRAGLTMAPLEPE;

[0028] a third amino acid sequence comprising

(Sequence ID No. 3)
ASVVPQERQQVARKHYPNYKVIVLNDDFNTFRHVAACLMKYIPNMTSDR
AWELTNQVHYEGQAIVWVGPQVQAELYHEQLLRAGLTMAPLEPG;

[0029] a fourth amino acid sequence comprising

(Sequence ID No. 4)
ASVVPQERQQDTRKHYPNYKVIVLNDDFNTFRHVAACLMKYIPNKTSDR
AWELTNQVHYEGQAIVWVGPQEQAELYHEQLLRAGLTMAPLEPE;

[0030] a fifth amino acid sequence comprising

(Sequence ID No. 5)
ASVVPQERQQVTRKHYPNYKVIVLNDDFNTFRHVAACLMKYIPNMTSDR
AWELTNQVHYKGQAIVWVGPQEQAELNHEQLLRAGLTMAPLEPE;

[0031] a sixth amino acid sequence comprising

(Sequence ID No. 6)
ASVVPQERQQVARKHYPNYKVIVLNDDFNTFRHVAACLMKYIPNMTSDR
AWELTNQVHYEGQAIVWVGPQEQAELYHEQLLRAGLTMAPLEPE;

[0032] a seventh amino acid sequence comprising

(Sequence ID No. 7)
ASVVPQERQQDTRKHYPNYKVIVLNDDFNTFRHVAACLMKYIPNMTSDR
AWELTNQVHYKGQAIVWVGPQVQAELYHEQLLRAGLTMAPLEPG;

[0033] an eighth amino acid sequence comprising

(Sequence ID No. 8)
ASVVPQERQQDTRKHYPNYKVIVLNDDFNTFRHVAACLMKYIPNMTSDR
AWELTNQVHYEGQAIVWVGPQVQAELYHEQLLRAGLTMAPLEPG;

[0034] a ninth amino acid sequence comprising

(Sequence ID No. 9)
ASVVPQEGQQVTRKHYPNYKVIVLNDDFNTFQHVVACLKKYIPNMISDR
AWELTNQVHYGGRAIVWVGPQEQAELNHEQLLRAGLTMAPLEPE;

[0035] a tenth amino acid sequence comprising, or

(Sequence ID No. 10)
ASVVPQERQQVARKHYPNYKVIVLNDDFNTFRHVAACLMKYIPNMTSDR
AWELTNQVHYEGQAIVWVGPQVQAELNHEQLLRAGLTMAPLEPE;

[0036] or an eleventh amino acid sequence with a homology of at least 30% compared to an amino acid sequence comprising the first amino acid sequence, the second amino acid sequence, the third amino acid sequence, the fourth amino acid sequence, the fifth amino acid sequence, the sixth amino acid sequence, the seventh amino acid sequence, the eighth amino acid sequence, the ninth amino acid sequence, or the tenth amino acid sequence.

[0037] Disclosed is a process for selectively identifying an N-terminal amino acid, the process comprising: providing an analyte; contacting a C-terminal end of the analyte with an anchor; anchoring the C-terminal end to the anchor to form an anchored analyte; contacting an N-terminal amino acid of the anchored analyte with a binder complex, the binder complex comprising: an amino acid-specific binder; and a taggant attached to the amino acid-specific binder; selectively binding the amino acid-specific binder of the binder complex to the N-terminal amino acid of the anchored analyte when the N-terminal amino acid is a binding amino acid to form a tagged complex; subjecting the taggant of the tagged complex to a stimulus; producing, by the taggant of the tagged complex, a taggant signal in response to the stimulus; detecting the taggant signal; and identifying the N-terminal amino acid based on the taggant signal, wherein the amino acid-specific binder binds selectively to the binding amino acid, and the amino acid-specific binder comprises:
[0038] a first amino acid sequence comprising

(Sequence ID No. 1)
ASVVPQEGQQVTRKHYPNYKVIVLNDDFNTFQHVVACLKKYIPNMISDR
AWELTNQVHYGGRAIVWVGPQEQAELYHEQLLRAGLTMAPLEPE;

[0039] a second amino acid sequence comprising

(Sequence ID No. 2)
ASVVPQERQQDTRKHYPNYKVIVLNDDFNTFRHVAACLMKYIPNMTSDR
AWELTNQVHYEGQAIVWVGPQEQAELYHEQLLRAGLTMAPLEPE;

[0040] a third amino acid sequence comprising

(Sequence ID No. 3)
ASVVPQERQQVARKHYPNYKVIVLNDDFNTFRHVAACLMKYIPNMTSDR
AWELTNQVHYEGQAIVWVGPQVQAELYHEQLLRAGLTMAPLEPG;

[0041] a fourth amino acid sequence comprising

(Sequence ID No. 4)
ASVVPQERQQDTRKHYPNYKVIVLNDDFNTFRHVAACLMKYIPNKTSDR
AWELTNQVHYEGQAIVWVGPQEQAELYHEQLLRAGLTMAPLEPE;

[0042] a fifth amino acid sequence comprising

(Sequence ID No. 5)
ASVVPQERQQVTRKHYPNYKVIVLNDDFNTFRHVAACLMKYIPNMTSDR
AWELTNQVHYKGQAIVWVGPQEQAELNHEQLLRAGLTMAPLEPE;

[0043] a sixth amino acid sequence comprising

(Sequence ID No. 6)
ASVVPQERQQVARKHYPNYKVIVLNDDFNTFRHVAACLMKYIPNMTSDR
AWELTNQVHYEGQAIVWVGPQEQAELYHEQLLRAGLTMAPLEPE;

[0044] a seventh amino acid sequence comprising

(Sequence ID No. 7)
ASVVPQERQQDTRKHYPNYKVIVLNDDFNTFRHVAACLMKYIPNMTSDR
AWELTNQVHYKGQAIVWVGPQVQAELYHEQLLRAGLTMAPLEPG;

[0045] an eighth amino acid sequence comprising

(Sequence ID No. 8)
ASVVPQERQQDTRKHYPNYKVIVLNDDFNTFRHVAACLMKYIPNMTSDR
AWELTNQVHYEGQAIVWVGPQVQAELYHEQLLRAGLTMAPLEPG;

[0046] a ninth amino acid sequence comprising

(Sequence ID No. 9)
ASVVPQEGQQVTRKHYPNYKVIVLNDDFNTFQHVVACLKKYIPNMISDR
AWELTNQVHYGGRAIVWVGPQEQAELNHEQLLRAGLTMAPLEPE;

[0047] a tenth amino acid sequence comprising, or

(Sequence ID No. 10)
ASVVPQERQQVARKHYPNYKVIVLNDDFNTFRHVAACLMKYIPNMTSDR
AWELTNQVHYEGQAIVWVGPQVQAELNHEQLLRAGLTMAPLEPE;

[0048] or an eleventh amino acid sequence with a homology of at least 30% compared to an amino acid sequence comprising the first amino acid sequence, the second amino acid sequence, the third amino acid sequence, the fourth amino acid sequence, the fifth amino acid sequence, the sixth amino acid sequence, the seventh amino acid sequence, the eighth amino acid sequence, the ninth amino acid sequence, or the tenth amino acid sequence.

[0049] Disclosed is a process for selectively isolating an analyte, the process comprising: contacting an amino acid-specific binder with an analyte comprising a protein, a peptide, an amino acid, or a combination comprising at least one of foregoing; selectively binding the amino acid-specific binder to the N-terminal amino acid of the analyte when the N-terminal amino acid is a binding amino acid to form an isolation complex; separating the isolation complex from a fluid in which the isolation complex is disposed to selectively isolating the analyte, wherein the amino acid-specific binder binds selectively to the binding amino acid, and the amino acid-specific binder comprises:
[0050] a first amino acid sequence comprising

(Sequence ID No. 1)
ASVVPQEGQQVTRKHYPNYKVIVLNDDFNTFQHVVACLKKYIPNMISDR
AWELTNQVHYGGRAIVWVGPQEQAELYHEQLLRAGLTMAPLEPE;

[0051] a second amino acid sequence comprising

(Sequence ID No. 2)
ASVVPQERQQDTRKHYPNYKVIVLNDDFNTFRHVAACLMKYIPNMTSDR
AWELTNQVHYEGQAIVWVGPQEQAELYHEQLLRAGLTMAPLEPE;

[0052] a third amino acid sequence comprising

(Sequence ID No. 3)
ASVVPQERQQVARKHYPNYKVIVLNDDFNTFRHVAACLMKYIPNMTSDR
AWELTNQVHYEGQAIVWVGPQVQAELYHEQLLRAGLTMAPLEPG;

[0053] a fourth amino acid sequence comprising

(Sequence ID No. 4)
ASVVPQERQQDTRKHYPNYKVIVLNDDFNTFRHVAACLMKYIPNKTSDR
AWELTNQVHYEGQAIVWVGPQEQAELYHEQLLRAGLTMAPLEPE;

[0054] a fifth amino acid sequence comprising

(Sequence ID No. 5)
ASVVPQERQQVTRKHYPNYKVIVLNDDFNTFRHVAACLMKYIPNMTSDR
AWELTNQVHYKGQAIVWVGPQEQAELNHEQLLRAGLTMAPLEPE;

[0055] a sixth amino acid sequence comprising

(Sequence ID No. 6)
ASVVPQERQQVARKHYPNYKVIVLNDDFNTFRHVAACLMKYIPNMTSDR
AWELTNQVHYEGQAIVWVGPQEQAELYHEQLLRAGLTMAPLEPE;

[0056] a seventh amino acid sequence comprising

(Sequence ID No. 7)
ASVVPQERQQDTRKHYPNYKVIVLNDDFNTFRHVAACLMKYIPNMTSDR
AWELTNQVHYKGQAIVWVGPQVQAELYHEQLLRAGLTMAPLEPG;

[0057] an eighth amino acid sequence comprising

(Sequence ID No. 8)
ASVVPQERQQDTRKHYPNYKVIVLNDDFNTFRHVAACLMKYIPNMTSDR
AWELTNQVHYEGQAIVWVGPQVQAELYHEQLLRAGLTMAPLEPG;

[0058] a ninth amino acid sequence comprising

(Sequence ID No. 9)
ASVVPQEGQQVTRKHYPNYKVIVLNDDFNTFQHVVACLKKYIPNMISDR
AWELTNQVHYGGRAIVWVGPQEQAELNHEQLLRAGLTMAPLEPE;

[0059] a tenth amino acid sequence comprising, or

(Sequence ID No. 10)
ASVVPQERQQVARKHYPNYKVIVLNDDFNTFRHVAACLMKYIPNMTSDR
AWELTNQVHYEGQAIVWVGPQVQAELNHEQLLRAGLTMAPLEPE;

[0060] or an eleventh amino acid sequence with a homology of at least 30% compared to an amino acid sequence comprising the first amino acid sequence, the second amino acid sequence, the third amino acid sequence, the fourth amino acid sequence, the fifth amino acid sequence, the sixth amino acid sequence, the seventh amino acid sequence, the eighth amino acid sequence, the ninth amino acid sequence, or the tenth amino acid sequence.

### BRIEF DESCRIPTION OF THE DRAWINGS

[0061] The following description should not be considered limiting in any way. With reference to the accompanying drawings, like elements are numbered alike.

[0062] FIG. 1 shows an amino acid-specific binder selectively bound to an amino acid that is a binding amino acid of an analyte in panel A. and panel B shows a non-binding amino acid unbound to an amino acid-specific binder;

[0063] FIG. 2 shows an amino acid-specific binder of a binder complex selectively bound to a binding amino acid of an analyte in panel A, and panel B shows a non-binding amino acid unbound to an amino acid-specific binder of a binder complex;

[0064] FIG. 3 shows a binder complex in an absence of an intervening member in panel A and inclusion of an intervening member in panel B;

[0065] FIG. 4 shows a binder complex that includes an amino acid-specific binder attached to a taggant in panel A, a protein in panel B, a chemical modifier in panel C, and a substrate in panel D;

[0066] FIG. 5 shows a binder complex that includes a plurality of amino acid-specific binders attached to an adjunct in panel A and panel B and attached to a plurality of adjuncts in panel C;

[0067] FIG. 6 shows an analyte that includes a binding amino acid in panel A, a non-binding amino acid in panel B, a binding amino acid and non-binding amino acid in panel C. and an analyte that is a peptide or protein that includes a plurality of amino acids in panel D and panel E;

[0068] FIG. 7 shows an anchored analyte in an absence of an intervening member in panel A and inclusion of an intervening member in panel B;

[0069] FIG. 8 shows an anchored analyte in panel A; and a tagged complex in panel B;

[0070] FIG. 9 shows an anchored analyte in panel A; in panel B, the anchored analyte shown in panel A after removal of an N-terminal amino acid; in panel C, the anchored analyte shown in panel B after removal of an N-terminal amino acid; and in panel D, a tagged complex with production of a taggant signal;

[0071] FIG. 10 shows an anchored analyte in panel A; in panel B, the anchored analyte shown in panel A after production of an inert residue from an N-terminal amino acid; and in panel C, the anchored analyte shown in panel B after production of another inert residue;

[0072] FIG. 11 shows, in panel A, an isolated complex that includes an amino acid-specific binder selectively bound to an analyte; in panel B, an isolated complex that includes an amino acid-specific binder selectively bound an N-terminal amino acid that is a binding amino acid in an analyte; and in panel C, an isolated complex that includes an amino acid-specific binder of a binder complex selectively bound to an N-terminal amino acid that is a binding amino acid in an analyte;

[0073] FIG. 12 shows formation of a tagged complex and detection of a taggant signal;

[0074] FIG. 13 shows formation of a tagged complex and detection of a taggant signal;

[0075] FIG. 14 shows a fluorescent labeling for detection of peptide binding during flow cytometry, wherein myc tag 260 is detected with fluorescent label taggant 214 on anti-myc antibody 256. Peptide 248 is detected using streptavidin-PE 258 that binds biotin 264 attached to C-terminus 224 of peptide 248. It should be appreciated that there are other tags besides myc and different fluorophores;

[0076] FIG. 15 shows an expected flow cytometry result for yeast that displays a non-binding protein in quadrant 1 (Q1), yeast that binds the peptide in Q2, yeast that does not display the protein in Q3, and yeast that exhibits non-specific binding to the peptide in Q4;

[0077] FIG. 16 shows a graph of fluorescent taggant fluorescence versus phycoerythrin (PE) fluorescence for flow cytometry plots displaying PE fluorescence seen in a naïve library against a leucine (Leu) peptide, wherein Q2 correspond to cells carried on to a next round of sorting after outgrowth;

[0078] FIG. 17 shows a graph of fluorescent taggant fluorescence versus PE fluorescence for flow cytometry plots displaying increased PE fluorescence seen in each round after the data shown in FIG. 15 and an additional 3 rounds of selection of a library against a Leu peptide;

[0079] FIG. 18 shows the number of cells counted in Q2, as determined via fluorescent taggant fluorescence versus PE fluorescence for flow cytometry plots, showing the magnitude of difference in binding against Phe, Tyr, Trp, and a variety of Leu peptides between a naïve library and a library resulting from three rounds of selection;

[0080] FIG. 19 shows alignment of Thermosynechococcus elongatus ClpS2 (Sequence ID No. 11), Agrobacterium tumefaciens ClpS2 (Sequence ID. No. 12), and an engineered NAAB-Phe protein sequences. T. elongatus ClpS2 has 29% sequence identity to A. tumefaciens ClpS2 and 31% sequence identity to the engineered NAAB-Phe. Positions of library-selected mutations for T. elongatus ClpS2 are indicated by pointers. Sequence features used to distinguish phylum of ClpS variant are boxed; and

[0081] FIG. 20 shows the association curve of T. elongatus ClpS2 with the Leu peptide variant and the association curve with the same Leu peptide for a composite protein sequence which incorporates the mutants from the library generated from T. elongatus ClpS2.

### DETAILED DESCRIPTION

[0082] A detailed description of one or more embodiments is presented herein by way of exemplification and not limitation.

[0083] It has been discovered that an amino acid-specific binder herein selectively binds to a binding amino acid selected from a group of specific amino acids. Indeed, the amino acid-specific binder overcomes a central challenge in single-molecule protein sequencing technology and provides high-fidelity, sequential recognition, detection of specific amino acids that can be included in a peptide sequence. Moreover, the amino acid-specific binder overcomes lack of selectivity involved with an N-End Rule Pathway adaptor protein (NERPap). ClpS, that natively recognizes an N-terminal amino acid (NAA) on a peptide chain, wherein the NERPap lacks selectivity and affinity for peptide sequencing Beneficially and unexpectedly, the amino acid-specific binder provides selectivity by including novel sequence variants of T. elongatus ClpS2, a ClpS protein, such that the amino acid-specific binder has enhanced affinity and selectivity for the amino acid leucine (Leu), which can occur as a single binding amino acid or at an N-terminus of a peptide or protein. Advantageously, the amino acid-specific binder determines a sequence or fingerprint of amino acids in a peptide or protein when used iteratively.

[0084] Amino acid-specific binder 200 selectively binds to binding amino acid 210 in analyte 212. In an embodiment, amino acid-specific binder 200 is a first amino acid sequence including X1-GQQVT-X2-QHVV-X3-K-X4-MI-X5-GGR-X6-E-X7-Y-X8-E; a second amino acid sequence including X1-RQQDT-X2-RHVA-X3-M-X4-MT-X5-EGQ-X6-E-X7-Y-X8-E; a third amino acid sequence including X1-RQQVA-X2-RHVA-X3-M-X4-MT-X5-EGQ-X6-V-X7-Y-X8-G; a fourth amino acid sequence including X1-RQQDT-X2-RHVA-X3-M-X4-KT-X5-EGQ-X6-E-X7-Y-X8-E; a fifth amino acid sequence including X1-RQQVT-X2-RHVA-X3-M-X4-MT-X5-KGQ-X6-E-X7-N-X8-E; a sixth amino acid sequence including X1-RQQVA-X2-RHVA-X3-M-X4-MT-X5-EGQ-X6-E-X7-Y-X8-E; a seventh amino acid sequence including X1-RQQDT-X2-RHVA-X3-M-X4-MT-X5-KGQ-X6-V-X7-Y-X8-G; or an eighth amino acid sequence including X1-RQQDT-X2-RHVA-X3-M-X4-MT-X5-EGQ-X6-V-X7-Y-X8-G, wherein. X1 includes an amino acid sequence including ASVVPQE (Sequence ID No. 20); X2 includes an amino acid sequence including RKHYPNYKVIVLNDDFNTF; X3 includes an amino acid sequence including ACL (Sequence ID No. 21); X4 includes an amino acid sequence including KYIPN (Sequence ID No. 22); X5 includes an amino acid sequence including SDRAWELTNQVHY (Sequence ID No. 23); X6 includes an amino acid sequence including AIVWVGPQ (Sequence ID No. 24); X7 includes an amino acid sequence including QAEL (Sequence ID No. 25); and X8 includes an amino acid sequence including HEQLLRAGLTMAPLEP (Sequence ID No. 26), such that a total percentage amount of substitutions and deletions to X1, X2. X3, X4, X5. X6, X7, and X8 is from 0% to less than 30%, exclusive of PSVVPQERQQVTRKHYPNYKVIVLNDDFNTFQHVAACLMKYIPNMTSDRAWELTN QVHYEGQAIVWVGPQEQAELYHEQLLRAGLTMAPLEPE (Sequence ID No. 27).

[0085] In an embodiment, amino acid-specific binder 200 is a protein that includes an amino acid that sequence is ASVVPQEGQQVTRKHYPNYKVIVLNDDFNTFQHVVACLKKYIPNMISDRAWELTNQ VHYGGRAIVWVGPQEQAELYHEQLLRAGLTMAPLEPE (Sequence ID No. 1); ASVVPQERQQDTRKHYPNYKVIVLNDDFNTFRHVAACLMKYIPNMTSDRAWELTN QVHYEGQAIVWVGPQEQAELYHEQLLRAGLTMAPLEPE (Sequence ID No. 2); ASVVPQERQQVARKHYPNYKVIVLNDDENTFRHVAACLMKYIPNMTSDRAWELTN QVHYEGQAIVWVGPQVQAELYHEQLLRAGLTMAPLEPG (Sequence ID No. 3); ASVVPQERQQDTRKHYPNYKVIVLNDDFNTFRHVAACLMKYIPNKTSDRAWELTN QVHYEGQAIVWVGPQEQAELYHEQLLRAGLTMAPLEPE (Sequence ID No. 4); ASVVPQERQQVTRKHYPNYKVIVLNDDENTFRHVAACLMKYIPNMTSDRAWELTN QVHYKGQAIVWVGPQEQAELNHEQLLRAGLTMAPLEPE (Sequence ID No. 5); ASVVPQERQQVARKHYPNYKVIVLNDDFNTFRHVAACLMKYIPNMTSDRAWELTN QVHYEGQAIVWVGPQEQAELYHEQLLRAGLTMAPLEPE (Sequence ID No. 6); ASVVPQERQQDTRKHYPNYKVIVLNDDFNTFRHVAACLMKYIPNMTSDRAWELTN QVHYKGQAIVWVGPQVQAELYHEQLLRAGLTMAPLEPG (Sequence ID No. 7); ASVVPQERQQDTRKHYPNYKVIVLNDDFNTFRHVAACLMKYIPNMTSDRAWELTN QVHYEGQAIVWVGPQVQAELYHEQLLRAGLTMAPLEPG (Sequence ID No. 8); ASVVPQEGQQVTRKHYPNYKVIVLNDDFNTFQHVVACLKKYIPNMISDRAWELTNQ VHYGGRAIVWVGPQEQAELNHEQLLRAGLTMAPLEPE (Sequence ID No. 9); ASVVPQERQQVARKHYPNYKVIVLNDDFNTFRHVAACLMKYIPNMTSDRAWELTN QVHYEGQAIVWVGPQVQAELNHEQLLRAGLTMAPLEPE (Sequence ID No. 10); or an amino acid sequence with a homology of at least 30% compared to an amino acid sequence comprising the amino acid sequence with Sequence ID No. 1, Sequence ID No. 2, Sequence ID No. 3, Sequence ID No. 4, Sequence ID No. 5, Sequence ID No. 6, Sequence ID No. 7, Sequence ID No. 8, Sequence ID No. 9, or Sequence ID No. 10. Amino acid-specific binder 200 binds selectively to binding amino acid 210 selected from the group consisting of isoleucine, leucine, phenylalanine, tryptophan, tyrosine, and valine; and chemically modified amino acids phenylalanine, tryptophan, tyrosine, isoleucine, leucine, and valine. Accordingly, with reference to FIG. 1, amino acid-specific binder 200 selectively binds to binding amino acid 210 of analyte 212 but does not bind to non-binding amino acid 211.

[0086] In an embodiment, the amino acid sequence includes:

(Sequence ID No. 1)
ASVVPQEGQQVTRKHYPNYKVIVLNDDFNTFQHVVACLKKYIPNMISDR
AWELTNQVHYGGRAIVWVGPQEQAELYHEQLLRAGLTMAPLEPE;
(Sequence ID No. 2)
ASVVPQERQQDTRKHYPNYKVIVLNDDENTFRHVAACLMKYIPNMTSDR
AWELTNQVHYEGQAIVWVGPQEQAELYHEQLLRAGLTMAPLEPE;
(Sequence ID No. 3)
ASVVPQERQQVARKHYPNYKVIVLNDDFNTFRHVAACLMKYIPNMTSDR
AWELTNQVHYEGQAIVWVGPQVQAELYHEQLLRAGLTMAPLEPG;
(Sequence ID No. 4)
ASVVPQERQQDTRKHYPNYKVIVLNDDFNTFRHVAACLMKYIPNKTSDR
AWELTNQVHYEGQAIVWVGPQEQAELYHEQLLRAGLTMAPLEPE;
(Sequence ID No. 5)
ASVVPQERQQVTRKHYPNYKVIVLNDDENTFRHVAACLMKYIPNMTSDR
AWELTNQVHYKGQAIVWVGPQEQAELNHEQLLRAGLTMAPLEPE;
(Sequence ID No. 6)
ASVVPQERQQVARKHYPNYKVIVLNDDFNTFRHVAACLMKYIPNMTSDR
AWELTNQVHYEGQAIVWVGPQEQAELYHEQLLRAGLTMAPLEPE;
(Sequence ID No. 7)
ASVVPQERQQDTRKHYPNYKVIVLNDDFNTFRHVAACLMKYIPNMTSDR
AWELTNQVHYKGQAIVWVGPQVQAELYHEQLLRAGLTMAPLEPG;
(Sequence ID No. 8)
ASVVPQERQQDTRKHYPNYKVIVLNDDFNTFRHVAACLMKYIPNMTSDR
AWELTNQVHYEGQAIVWVGPQVQAELYHEQLLRAGLTMAPLEPG;
(Sequence ID No. 9)
ASVVPQEGQQVTRKHYPNYKVIVLNDDFNTFQHVVACLKKYIPNMISDR
AWELTNQVHYGGRAIVWVGPQEQAELNHEQLLRAGLTMAPLEPE;
or
(Sequence ID No. 10)
ASVVPQERQQVARKHYPNYKVIVLNDDFNTFRHVAACLMKYIPNMTSDR
AWELTNQVHYEGQAIVWVGPQVQAELNHEQLLRAGLTMAPLEPE.

[0087] According to an embodiment, amino acid-specific binder 200 is a protein with Sequence ID No. 1 and binds selectively to leucine.

[0088] According to an embodiment, amino acid-specific binder 200 is a protein with Sequence ID No. 2 and binds selectively to leucine.

[0089] According to an embodiment, amino acid-specific binder 200 is a protein with Sequence ID No. 3 and binds selectively to leucine.

[0090] According to an embodiment, amino acid-specific binder 200 is a protein with Sequence ID No. 4 and binds selectively to leucine.

[0091] According to an embodiment, amino acid-specific binder 200 is a protein with Sequence ID No. 5 and binds selectively to leucine.

[0092] According to an embodiment, amino acid-specific binder 200 is a protein with Sequence ID No. 6 and binds selectively to leucine.

[0093] According to an embodiment, amino acid-specific binder 200 is a protein with Sequence ID No. 7 and binds selectively to leucine.

[0094] According to an embodiment, amino acid-specific binder 200 is a protein with Sequence ID No. 8 and binds selectively to leucine.

[0095] According to an embodiment, amino acid-specific binder 200 is a protein with Sequence ID No. 9 and binds selectively to leucine.

[0096] According to an embodiment, amino acid-specific binder 200 is a protein with Sequence ID No. 10 and binds selectively to leucine.

[0097] According to an embodiment, amino acid-specific binder 200 is a protein with a sequence homology of at least 30% compared to an amino acid sequence selected from the group consisting essentially of the amino acid sequence with Sequence ID No. 1, Sequence ID No. 2, Sequence ID No. 3. Sequence ID No. 4, Sequence ID No. 5, Sequence ID No. 6. Sequence ID No. 7, Sequence ID No. 8, Sequence ID No. 9, and Sequence ID No. 10 and binds selectively to leucine

[0098] Binder complex 228 selectively identifies an amino acid. In an embodiment, binder complex 228 includes amino acid-specific binder 200 and adjunct 236 attached to amino acid-specific binder 200. Attachment of adjunct 236 to amino acid-specific binder 200 can include a covalent bond, an ionic bond, electrostatic interaction (e.g., a π-cation interaction, dipole-dipole interaction, a multi-pole interaction, and the like), intercalation, a clathrate arrangement (e.g., with adjunct 236 partially or wholly trapped in amino acid-specific binder 200 or vice-versa, such that amino acid-specific binder 200 can still selectively bind to binding amino acid 210, e.g., of analyte 212), and the like. Further, adjunct 236 can be attached to amino acid-specific binder 200 either directly, indirectly, or a combination thereof. With reference to FIG. 3, when adjunct 236 is directly attached to amino acid-specific binder 200, direct attachment occurs in an absence of an intervening member between adjunct 236 and amino acid-specific binder 200 as shown in panel A. When adjunct 236 is indirectly attached to amino acid-specific binder 200 as shown in panel B, indirect attachment occurs in a presence of the intervening member 246 between adjunct 236 and amino acid-specific binder 200. Accordingly, with reference to FIG. 2, amino acid-specific binder 200 selectively binds to binding amino acid 210 of analyte 212 but does not bind to non-binding amino acid 211.

[0099] In binder complex 228, with reference to FIG. 3, adjunct 236 can determine a position or identity of amino acid-specific binder 200 and determine if amino acid-specific binder 200 is bound to analyte 212. Adjunct 236 can be taggant 214, protein 238, substrate 240, chemical modifier 242, or a combination thereof, e.g., as shown in FIG. 4. In an embodiment, adjunct 236 includes taggant 214. In an embodiment, adjunct 236 includes a substrate such that analyte 212 can be immobilized when in contact with amino acid-specific binder 200. Binder complex 228 can include an arbitrary number of amino acid-specific binder 200 and adjunct 236 that can be connectedly attached in an arbitrary arrangement as shown in FIG. 5.

[0100] Protein 238 can include a protein to facilitate expression or purification of amino-acid specific binder 200 such as a protein with a functional group that can be immobilized on a resin, an antibody, Protein A, Protein G, a peptide of six histidine residues. Glutathione S-transferase, maltose binding protein, biotin, or streptavidin. Moreover, protein 238 can include a protein with a reactive property such as enzymatic activity, a protease cleavage site, or fluorescence that can be stimulated to produce a signal and can be green fluorescent protein, horseradish peroxidase, luciferase, and the like. Moreover, protein 238 can include proteins with a selected molecular weight, isoelectric point, or functional group that can facilitate separation of binding complex 238, e.g., by dialysis, chromatography, or gradient centrifugation Exemplary proteins 238 include an immunoglobulin, a high molecular weight protein (HMWP), DNA-binding protein, oligosaccharide binding protein, and the like. In an embodiment, protein 238 is biotinylated and can be attached to a substrate through interaction with streptavidin.

[0101] Substrate 240 can include magnetic beads, fluorescent beads, silica coverslips, or microplates to attach amino acid-specific binder 200 to the substrate surface and can be a functionalized glass slide. Moreover, the substrate can be used for localization of amino acid-specific binder 200 by providing separation either by size or magnetism or physical movement of the substrate. The substrate can also be used to detect a taggant signal such as with fluorescent microscopy and can be a functionalized surface that is optically clear. Exemplary substrates 240 include NHS-ester functionalized glass slides, streptavidin coated magnetic beads or microplates, a nickel coated resin, and the like. In an embodiment, substrate 240 includes a nickel coated resin.

[0102] Chemical modifier 242 can include a reactive species that can be used in a non-covalent binding reaction or a cross-linking reaction or can be used to amplify a signal. Exemplary chemical modifiers 242 include click-chemistry compatible moieties, N-hydroxysuccinimide esters, biotin, maleimide, hydrazide, carbodiimide compounds for carboxylic acid cross-linking, photocatalysts, or electrocatalysts. In an embodiment, chemical modifier 242 includes an azide.

[0103] Exemplary taggant 214 are listed in Table 1 and can include a fluorescent moiety that can include embedded a fluorophore disposed in a shell, an electrochemical moiety, chemiluminescent moiety, Forster resonance energy transfer (FRET) pair, catalytic enzyme, chemical modification, or a combination comprising at least one of the foregoing moieties, that transduce or amplify stimulus 218 to a measurable response as taggant signal 216 for detecting a presence of amino acid-specific binder 200. In an embodiment, taggant 214 is a fluorophore (e.g. a fluorophore commercially available as ALEXAFLUOR such as ALEXAFLUOR647 and the like) that includes conjugated electrons to produce fluorescence upon stimulation by stimulant 218. Exemplary taggants 214 include horseradish peroxidase, fluorescein, rhodamine, and the like. In an embodiment, taggant 214 includes a fluorescently labelled dye (e.g., a dye such as commercially available as ATTOS32). Taggant 214 produces taggant signal 216 in response to being subjected to stimulus 218.

TABLE 1

| | Complex | | | |
|---|---|---|---|---|
| | formation | | | |
| Taggant | method | Stimulant | Signal | Detection |
| Fluorophore | NHS-ester lysine | Photon | Photon | intensity or |
| | sidechain | | | wavelength |
| Chemiluminescence | Luciferase fusion | ATP | Photon | Intensity |
| Electrochemiluminescence | Fusion with | Electrode | photon | PMT |
| | Ru(Bpy)3 | potential | | |
| FRET pair | a fluorophore on | Photon | Photon | Intensity or |
| | amino acid- | | | wavelength |
| | specific binder | | | |
| | 200, a | | | |
| | fluorophore on | | | |
| | analyte 212, or | | | |
| | fluorophores on | | | |
| | amino acid- | | | |
| | specific binder | | | |
| | 200 | | | |
| Catalytic enzyme | Horseradish | Addition of | Absorbance | Spectrophotometer |
| | peroxidase | chromogenic | at a | |
| | fusion | substrate | wavelength | |
| Radioactive element | ³⁵S-methionine, | None | Radioactivity | Scintillation |
| | ³²P- | | | counting or radio |
| | phosphorylation, | | | image |
| | or tritium | | | |
| | labeling of | | | |
| | amino acid | | | |
| | binder 200 | | | |

[0104] Stimulus 218 can include light emitted from a lamp, laser, LED, or a chromogenic substrate such as tetramethylbenzidine (TMB). Exemplary stimulus 218 includes laser light such as 30 mW, 488 nm laser light. In an embodiment, stimulus 218 is a photon, e.g., from a light source such as a laser, flash lamp, and the like. In an embodiment, stimulus 218 is a redox potential pulse.

[0105] Taggant signal 216 can have a temporal duration suitable for detection by an electrical amplifier, photodetector, scintillator, camera, and the like. In an embodiment, taggant signal 216 is fluorescence emission that is detected, e.g., by a detector such as a microscope that transmits the fluorescence to a CCD camera, wherein the location of emission can be correlated with the intensity of the signal.

[0106] In binder complex 228, with regard to indirect attachment of adjunct 236 to amino acid-specific binder 200, intervening member 246 can include a linker to connect adjunct 236 to amino acid-specific binder 200 but that does not provide additional functionality other than linking the two together. Intervening member 246 can be a protein, peptide, chemical moiety, nucleic acid, and the like. Moreover, intervening member 246 can be chemically inert such that it does not interfere with binding or signaling. Exemplary intervening members 264 include a poly-glycine or serine peptide, a polyethylene glycol (PEG), a glycan, an oligonucleotide, and the like. In an embodiment, intervening member 264 includes a GSGG peptide.

[0107] Amino acids 209 include binding amino acid 210 and analyte 212 as shown in FIG. 6. Here, in analyte 212, peptide 248 and protein 250 include a plurality of amino acids 209 (e.g., 209A, 209B . . . 209k) interconnected and terminating with N-terminal amino acid 220 that has free amine 252 and penultimate residue 234 and terminating with C-terminal end 224.

[0108] Amino acid-specific binder 200 selectively binds to binding amino acid 210 of analyte 212. Analyte 212 can include binding amino acid 210, non-binding amino acid 211, peptide 248, protein 250, or a combination thereof. Exemplary analytes 212 include proteins, peptides, free amino acids, and the like. In an embodiment, analyte 212 includes a protein that is cleaved using trypsin to produce a mixture of analytes 212 including binding amino acids 210 and non-binding amino acids 211.

[0109] Amino acid-specific binder 200 selectively binds to binding amino acid 210. Binding amino acid 210 can include certain naturally occurring amino acids, modified naturally occurring amino acids, non-naturally occurring amino acids, or modified non-naturally occurring amino acids. Selective binding of amino acid-specific binder 200 to binding amino acid 210 isolates binding amino acid 210 from other components in a fluid, identifies binding amino acid 210 as a particular species of amino acid (e.g., Leu, Phe, Trp, Tyr), and the like.

[0110] As used herein, “naturally occurring amino acid” refers to the 20 naturally occurring amino acids. Binding amino acids 210 that are naturally occurring amino acids are selected from group consisting of phenylalanine, tryptophan, tyrosine, leucine, isoleucine, and valine. As used herein, “modified naturally occurring amino acid” refers to naturally occurring amino acids in which a sidechain has been modified. Exemplary modifications include methylation, phosphorylation, glycosylation, deamination, oxidation, or selenocysteine formation. Accordingly, binding amino acids 210 that are modified naturally occurring amino acids include phosphotyrosine, N-acetylated valine, kynurenine and the like.

[0111] As used herein, “non-naturally occurring amino acid” refers to amino acids that are not naturally incorporated into peptide or protein polymers but can be synthetically incorporated into a polypeptide. Exemplary non-naturally occurring amino acids are D-amino acids, homo-amino acids, and amino acids with a non-natural sidechain such as biphenylalanine or azidophenylalanine. Accordingly, binding amino acids 210 that are non-naturally occurring amino acids include 5-bromo-tryptophan, homophenylalanine, homophenylalanine methyl ester hydrochloride, and the like.

[0112] As used herein, “modified non-naturally occurring amino acid” refers to a non-naturally occurring amino acid that has been modified. Exemplary modifications include such as methylation, phosphorylation, glycosylation, deamination, oxidation, or selenocysteine formation. Accordingly, binding amino acids 210 that are modified non-naturally occurring amino acids include 5-bromo-tryptophan, homophenylalanine, homopenylalanine methyl ester hydrochloride, and the like.

[0113] Amino acid-specific binder 200 does not bind to non-binding amino acid 211. Non-binding amino acid 211 can be a naturally occurring or non-naturally occurring amino acid exclusive of binding amino acid 210. Exemplary non-binding amino acids 211 include arginine, alanine, serine, threonine, proline, aspartic acid, asparagine, glutamine, glutamic acid. Since amino acid-specific binder 200 does not bind to non-binding amino acid 211 but does selectively bind to binding amino acid 210, non-binding amino acid 211 is determined as not belonging to the group of binding amino acids 210 selectively bound by amino acid-specific binder 200. Accordingly, while binding of amino acid-specific binder 200 to binding amino acid 210 can be used to isolate binding amino acid 210 from other components in a fluid, identify binding amino acid 210 as a particular species of amino acid (e.g., Leu, Phe, Trp, Tyr), and the like, not binding non-binding amino acid 211 can be used separate non-binding amino acid 211 from binding amino acid 210 and, by negative implication, determine a set of possible identities for binding amino acid 210.

[0114] Peptide 248 can include a plurality of amino acids, including binding amino acid 210, non-binding amino acid 211, or a combination thereof. Moreover, amino acids in peptide 248 are arranged to include N-terminal amino acid 220 and C-terminal end 224. Peptide 248 can be naturally occurring or can be a portion of a longer peptide or protein. Exemplary peptides 248 include a peptide from a proteolytic or tryptic digest of an isolated protein or protein found in blood or serum. Binding of amino acid-specific binder 200 to binding amino acid 210 can be used to isolate binding amino acid 210 from other components in a fluid, identify binding amino acid 210 as a particular species of amino acid (e.g., Leu, Phe, Trp. Tyr), and the like.

[0115] Protein 250 can include a plurality of amino acids, including binding amino acid 210, non-binding amino acid 211, or a combination thereof. Moreover, amino acids in protein 250 are arranged to include N-terminal amino acid 220 and C-terminal end 224. Protein 250 can be obtained from a mixture of proteins as found within a blood or serum sample. In an embodiment, protein 250 includes serum proteins.

[0116] In some embodiments, with reference to FIG. 7, analyte 212 forms anchored analyte 226 in combination with anchor 222. Anchor 222 can include a substrate containing a surface on which to immobilize the analyte such that it can be sequestered or measured. Anchor 222 can be a resin, glass slide, magnetic bead. Exemplary anchor 222 includes a streptavidin coated sensor, microplate, and the like. In an embodiment, anchor 222 includes a streptavidin coated microplate, and intervening member 264 includes biotin.

[0117] Exemplary anchored analyte 226 includes a peptide analyte 212 anchored via the lysine sidechain to an NHS-ester coated glass slide and the like. It is contemplated that attachment of analyte 212 to anchor 222 can include a covalent bond, an ionic bond, electrostatic interaction (e.g., a π-cation interaction, dipole-dipole interaction, a multi-pole interaction, and the like), intercalation, a clathrate arrangement (e.g., with analyte 212 partially or wholly trapped in anchor 222 or vice-versa, such that N-terminal amino acid 220 or binding amino acid 210 is exposed to amino acid-specific binder 200 for selectively binding), and the like. Further, analyte 212 can be attached to anchor 222 either directly, indirectly, or a combination thereof. When analyte 212 is directly attached to anchor 222, direct attachment occurs in an absence of an intervening member between analyte 212 and anchor 222. When analyte 212 is indirectly attached to anchor 222, indirect attachment occurs in a presence of the intervening member 246 between analyte 212 and anchor 222.

[0118] In an embodiment, anchored analyte 226 includes a peptide analyte 212 anchored via the lysine sidechain to an NHS-ester coated glass slide and the like.

[0119] With reference to FIG. 8, selectively binding binder complex 228 to anchored analyte 226 forms tagged complex 230, e.g., to determine an identity of amino acid 209 in analyte 212 of anchored analyte 226. When analyte 212 is protein 250, amino acids in protein 250 can be sequenced using binder complex 228.

[0120] In determining a sequence of amino acids in analyte 212 in anchored analyte 226, with reference to FIG. 9, N-terminal amino acid 220 can be removed by chemical modification to expose the penultimate residue 234 as the new N-terminal amino acid 220 (panel D). Subsequent removal to expose the next penultimate residue 234 as the new N-terminal amino acid 220 can be repeated such that every new amino acid in analyte 212 can be sequentially subjected to binder complex 228 for sequencing.

[0121] In determining a sequence of amino acids in analyte 212 in anchored analyte 226, with reference to FIG. 10, N-terminal amino acid 220 can be converted to inert residue 232. As used herein. “inert residue” refers to an amino acid that does not bind to amino acid-specific binder 200. The inert residue can be subsequently removed to expose the new penultimate residue 234 such that every new amino acid in analyte 212 can be sequentially subjected to binder complex 228 for sequencing.

[0122] With reference to FIG. 11, selectively binding binder complex 228 to analyte 212, not in anchored analyte 226, forms isolation complex 244, e.g., to isolate analyte 212, to determine an identity of amino acid 209 in analyte 212 of isolation complex 244 and the like. Isolation complex 244 can be isolated from a heterogeneous composition containing analyte 212 using properties of isolation complex 244 such as the molecular weight. A difference in molecular weight between the isolation complex and undesired components in the composition must be great enough so that isolation complex 244 can be separated from other constituents in the composition by dialysis, chromatography, and the like.

[0123] Amino acid-specific binder 200 can be made in various ways. A process for making amino acid-specific binder 200 can include selecting a sequence for amino acid-specific binder 200 and expressing and purifying amino acid-specific binder 200 from an organism or by recombinant formation. A protein can be purified from the organism with a purification technique. Purification can include ion-exchange on a column that includes a cation-exchanger column or anion-exchanger column (e.g., diethylaminomethyl (DEAE) column), a mixed-mode ion exchanger (e.g., hydroxyapatite), or column that separates proteins based on hydrophobicity. A protein can be purified by size exclusion chromatography (e.g., gel-filtration) or in a density gradient (such as glycerol). Purification can be performed with binding to a different column that can include a specific chemical characterization of each protein. For recombinant expression in Escherichia coli, purification can be facilitated using a tag such as histidine, maltose binding protein (MBP), glutathione S-transferase (GST), and the like. A gene can be cloned into a pET15b vector with an additional His6-tag at an N-terminus of the protein, followed by a tobacco etch virus (TEV) protease cleavage site (MGHHHHHHENLYFQG (Sequence ID No. 13)), using the NcoI and XhoI restriction sites and expressed in BL21 E. coli cells. Expression from pET vector is induced with 0.5 mM IPTG when optical density at 600 nm (OD₆₀₀) reaches 1.0 absorbance units and further incubated for 6 hours at 37° C. or 16 hours at 15° C. Cells are harvested by centrifugation at 5000 g for 20 minutes, and cell pellets can be frozen. Frozen cell pellets are resuspended in a lysis buffer (e.g., 100 mM Tris-HCl, pH 8.0, 300 mM NaCl, 25 mM imidazole, or 50 mM sodium phosphate, 300 mM NaCl, or 20 mM Hepes, pH 8.0, 150 mM KCl) and sonicated on a 500 W sonicator with a C1334 probe at 20% amplitude for a time (e.g., 4 seconds on, 20 seconds off, for 90 minutes) that provides a selected total time (e.g., 15 minutes) of sonication. The lysate is centrifuged (e.g., at 20,000 g for 40 minutes) and then incubated (e.g., for one hour) that can include a chelating fast flow sepharose resin coated with nickel and pre-equilibrated in lysis buffer. The mixture is centrifuged (e.g., at 1000 g for 10 minutes) and supernatant removed, and the resin resuspended in lysis buffer that can be used to form a column. The column is washed with lysis buffer, wash buffer (e.g., lysis buffer with imidazole), and eluted with elution buffer. Protein that is eluted is subjected to dialysis into lysis buffer. Protein is removed from dialysis tubing and centrifuged, and the supernatant concentration measured by Bradford assay against a BSA standard curve. The protein is loaded onto a size exclusion chromatography column pre-equilibrated in lysis buffer. Fractions are collected from the size exclusion chromatography column and monitored at 280 nm, wherein absorption peaks are compared with a standard and analyzed by electrophoresis such as SDS-PAGE. Fractions are combined, concentrated by centrifugation with a molecular weight cutoff, such as 10 kDa, centrifuged, and measured by Bradford assay to prepare amino acid-specific binder 200.

[0124] In an embodiment, making binder complex 228 includes expressing a fusion protein of amino acid-specific binder 200 and adjunct protein 238 in an organism and purifying the fusion protein from the organism. In an embodiment, making binder complex 238 includes expressing a tagged variant of amino acid-specific binder such that it can be labeled with biotin during expression. The biotin contacts amino acid-specific binder 200 with substrate 240. In an embodiment, making binder complex 238 includes incubating the amino acid-specific binder 200 with an amine reactive chemical moiety such as NHS-ester HRP or taggant such as a fluorophore such as an NHS-ester fluorescein so that the amino-acid specific binder 200 lysine residues are linked to the fluorophore or chemical moiety.

[0125] Amino acid-specific binder 200 has numerous advantageous and unexpected benefits and uses. In an embodiment, with reference to FIG. 7 and FIG. 9, a process for selectively identifying N-terminal amino acid 220 includes providing analyte 212 including protein 250, peptide 248, amino acid 209, or a combination thereof, contacting C-terminal end 224 of analyte 212 with anchor 222; anchoring C-terminal end 224 to anchor 222 to form anchored analyte 226; contacting N-terminal amino acid 220 of anchored analyte 226 with binder complex 228, binder complex 228 include: amino acid-specific binder 200; and taggant 214 attached to amino acid-specific binder 200; selectively binding amino acid-specific binder 200 of binder complex 228 to N-terminal amino acid 220 of anchored analyte 226 when N-terminal amino acid 220 includes binding amino acid 210 to form tagged complex 230; subjecting taggant 214 of tagged complex 230 to stimulus 218; producing, by taggant 214 of tagged complex 230, taggant signal 216 in response to stimulus 218; detecting taggant signal 216; and identifying N-terminal amino acid 220 based on taggant signal 216, wherein amino acid-specific binder 200 binds selectively to binding amino acid 210.

[0126] In the process for selectively identifying N-terminal amino acid 220, providing analyte 212 includes purifying or extracting the analyte 212 from a mixture of components that may interfere with subsequent reactions. Exemplary purifications include high performance liquid chromatography (HPLC) or precipitation with ammonium sulfate. A protein can also be digested using a protease such as trypsin to create multiple peptides which can serve as analytes 212. An immobilized trypsin can be used to create multiple peptides by digestion of a protein or serum sample and purification of the peptides from the trypsin.

[0127] In the process for selectively identifying N-terminal amino acid 220, contacting C-terminal end 224 of analyte 212 with anchor 222 includes incubating or flowing the C-terminal end 224 of analyte 212 over the anchor 222.

[0128] In the process for selectively identifying N-terminal amino acid 220, anchoring C′-terminal end 224 to anchor 222 to form anchored analyte 226 includes incubating the C-terminal end 224 with anchor 222 under reaction conditions to covalently link the two. Exemplary reactions would include performing an N-hydroxysuccinimide (NHS)-ester reaction to link the C-terminal amino acid sidechain lysine within analyte 212 with anchor 222 that is modified with an NHS-ester to produce an amide bond.

[0129] In the process for selectively identifying N-terminal amino acid 220, contacting N-terminal amino acid 220 of anchored analyte 226 with binder complex 228 includes incubating anchored analyte 226 and binder complex 228 in a reaction buffer for a time (e.g., from 5 sec to 30 min) for the binding reaction to occur based on a binding affinity of amino acid-specific binder 200 under a set of binding conditions (e.g., in IX PBS at 30° C.). When N-terminal amino acid 220 is non-binding amino acid 211, the binding reaction does not occur.

[0130] In the process for selectively identifying N-terminal amino acid 220, selectively binding amino acid-specific binder 200 of binder complex 228 to N-terminal amino acid 220 of anchored analyte 226 when N-terminal amino acid 220 includes binding amino acid 210 includes incubating anchored analyte 226 and binder complex 228 in a reaction buffer for a time (e.g., from 5 sec to 30 min) for the binding reaction to occur based on a binding affinity of amino acid-specific binder 200 under a set of a binding conditions (e.g., in 1×PBS at 30° C.). When N-terminal amino acid 220 includes binding amino acid 210, the binding reaction occurs.

[0131] With reference to taggants and stimulants, signal, and detection listed in Table 1, in the process for selectively identifying N-terminal amino acid 220, subjecting taggant 214 of tagged complex 230 to stimulus 218 includes exposing tagged complex 230 on a fluorescent microscope that provides a select wavelength of light as a stimulant to produce taggant response, wherein an LED can produce excitation at 628 nm as a stimulus.

[0132] In the process for selectively identifying N-terminal amino acid 220, producing, by taggant 214 of tagged complex 230, taggant signal 216 in response to stimulus 218 includes, e.g., producing a fluorescent photon.

[0133] In the process for selectively identifying N-terminal amino acid 220, detecting taggant signal 216 includes detecting emission with a microscope that includes a detector that detects a selected wavelength of emission. e.g., 692 nm fluorescence.

[0134] In the process for selectively identifying N-terminal amino acid 220, identifying N-terminal amino acid 220 based on taggant signal 216 includes analyzing the signal response and interpreting the response based on the experimental design associated with the tagged binder complex 228. In an embodiment, the taggant is a fluorophore with a selected wavelength of emission response that provides a signal for detection through fluorescence intensity at a selected wavelength of the response to identity binding amino acid 210.

[0135] With reference to FIG. 9 and FIG. 10, the process for selectively identifying N-terminal amino acid 220, also can include removing N-terminal amino acid 220 from anchored analyte 226 so that penultimate residue 234 becomes N-terminal amino acid 220 of anchored analyte 226 by Edman degradation.

[0136] The process for selectively identifying N-terminal amino acid 220, also can include contacting N-terminal amino acid 220 of anchored analyte 226 with binder complex 228 by incubating anchored analyte 226 and binder complex 228 in a reaction buffer for a time (e.g., from 5 sec to 30 min) for the binding reaction to occur based on a binding affinity of amino acid-specific binder 200 under a set of a binding conditions (e.g., in 1×PBS at 30° C.). When N-terminal amino acid 220 includes non-binding amino acid 211, the binding reaction does not occur.

[0137] The process for selectively identifying N-terminal amino acid 220, also can include selectively binding amino acid-specific binder 200 of binder complex 228 to N-terminal amino acid 220 of anchored analyte 226 when N-terminal amino acid 220 is binding amino acid 210 to form tagged complex 230 by incubating anchored analyte 226 and binder complex 228 in a reaction buffer for a time (e.g., from 5 sec to 30 min) for the binding reaction to occur based on a binding affinity of amino acid-specific binder 200 under a set of binding conditions (e.g., in 1×PBS at 30° C.). When N-terminal amino acid 220 includes binding amino acid 210, the binding reaction occurs, and the tagged complex forms.

[0138] The process for selectively identifying N-terminal amino acid 220, also can include subjecting taggant 214 of tagged complex 230 to stimulus 218. In an embodiment, tagged complex 230 is exposed to a selected wavelength and intensity of light to excite the fluorophore. In an embodiment, subjecting taggant 214 of tagged complex 230 to stimulus 218 includes adding a chromogenic substrate. Table 1 lists a taggant, stimulant, signal, and detection for adjuncts shown in Table 2.

[0139] The process for selectively identifying N-terminal amino acid 220 also can include producing, by taggant 214 of tagged complex 230, taggant signal 216 in response to stimulus 218. In an embodiment, taggant 214 is a fluorophore that emit light as taggant response at an emission wavelength after being stimulated by an excitation wavelength as the stimulus. In an embodiment, chromogenic substrate produces a chromogenic signal as when contacted by HRP as taggant 214.

[0140] The process for selectively identifying N-terminal amino acid 220 also can include detecting taggant signal 216 by methods listed in Table 2 for each taggant. In an embodiment, detection can involve a microscope with a CCD camera and selected filters in an optical system that detects a wavelength of emitted light. In an embodiment, a spectrophotometer measures absorbance at a selected wavelength to detect a chromogenic substrate. In an embodiment, a scintillation counter measures radioactivity of a radiolabeled complex.

TABLE 2

| Adjunct | Isolation Technique | Separation Property |
|---|---|---|
| High molecular weight | Dialysis | Size |
| protein | | |
| High molecular weight | Ultracentrifugation | Size |
| protein | | |
| Substrate | Physical Separation | binding analytes |
| | | are anchored |
| Protein with different | Precipitation | Solubility or |
| solubility | | Molecular weight |
| Protein with different | Isoelectric Gradient | Isoelectric point |
| isoelectric point | | |
| Protein with different | Density Gradient | Density |
| densities | | |

[0141] The process for selectively identifying N-terminal amino acid 220, also can include identifying N-terminal amino acid 220 based on taggant signal 216 by analyzing the signal response and interpreting the response based on tagged binder complex 228. When taggant 214 is a fluorophore, the intensity and wavelength of the taggant response identifies a binding amino acid 210 due to a higher signal than non-binding amino acid 211.

[0142] With reference to FIG. 10, instead of or in combination with removing N-terminal amino acid 220, the process for selectively identifying N-terminal amino acid 220 also can include converting N-terminal amino acid 220 to inert residue 232 by performing a partial Edman degradation reaction so that phenylisothiocyanate (PITC) remains attached to the N-terminal amino acid such that a binding reaction does not occur.

[0143] The process for selectively identifying N-terminal amino acid 220, also can include converting penultimate residue 234 to N-terminal amino acid 220 when inert residue 232 is removed by continuing the Edman degradation reaction to remove the PITC.

[0144] The process for selectively identifying N-terminal amino acid 220, also can include contacting N-terminal amino acid 220 of anchored analyte 226 with binder complex 228 by incubating anchored analyte 226 and binder complex 228 in a reaction buffer for a time (e.g., from 5 sec to 30 min) for the binding reaction to occur based on a binding affinity of amino acid-specific binder 200 under a set of a binding conditions (e.g., in 1×PBS at 30° C.′). When N-terminal amino acid 220 includes binding amino acid 210, the binding reaction occurs, and the tagged complex forms.

[0145] The process for selectively identifying N-terminal amino acid 220 also can include selectively binding amino acid-specific binder 200 of binder complex 228 to N-terminal amino acid 220 of anchored analyte 226 when N-terminal amino acid 220 is binding amino acid 210 to form tagged complex 230 by incubating anchored analyte 226 and binder complex 228 in a reaction buffer for a time (e.g., from 5 sec to 30 min) for the binding reaction to occur based on a binding affinity of amino acid-specific binder 200 under a set of binding conditions (e.g., in 1×PBS at 30° C.). When N-terminal amino acid 220 includes binding amino acid 210, the binding reaction occurs and tagged complex 230 forms.

[0146] The process for selectively identifying N-terminal amino acid 220, also can include subjecting taggant 214 of tagged complex 230 to stimulus 218 by exposing tagged complex 230 to a selected wavelength and intensity of light to excite the fluorophore. In an embodiment, subjecting taggant 214 of tagged complex 230 to stimulus 218 includes adding chromogenic substrate.

[0147] The process for selectively identifying N-terminal amino acid 220 also can include producing, by taggant 214 of tagged complex 230, taggant signal 216 in response to stimulus 218, e.g., by a method listed in Table 1. In an embodiment, detection can include detecting taggant response with a microscope including a CCD camera and filters in an optical system to detect a wavelength of emitted light. In an embodiment, a spectrophotometer measures absorbance at a selected wavelength to detect a chromogenic substrate. In an embodiment, a scintillation counter measures radioactivity of a radiolabeled complex.

[0148] The process for selectively identifying N-terminal amino acid 220, also can include detecting taggant signal 216. The process for selectively identifying N-terminal amino acid 220, also can include identifying N-terminal amino acid 220 based on taggant signal 216. In the process, converting N-terminal amino acid 220 to inert residue 232 can include chemically changing N-terminal amino acid 220 prior to producing inert residue 232.

[0149] In an embodiment, with reference to FIG. 12 and FIG. 13, a process for sequencing protein 250 includes providing sample 208; extracting protein 250 from sample 208; enzymatically digesting protein 250 to provide a plurality of peptides 248 (e.g., 248A, 248D); forming anchored analyte 226 by immobilizing peptides 248 on anchor 222; producing tagged complex 230; detecting taggant signal 216 from taggant 214; removing binder complex 228 by washing; cleaving N-terminal amino acid 220 so that penultimate residue 234 becomes a new N-terminal amino acid 220; and repeating so that multiple repetitions of steps occur, including producing tagged complex 230; detecting taggant signal 216 from taggant 214; and removing binder complex 228 by washing; cleaving N-terminal amino acid 220 so that penultimate residue 234 becomes a new N-terminal amino acid 220 to sequence protein 250.

[0150] In the process, chemically changing N-terminal amino acid 220 prior to producing inert residue 232 can include phosphorylating free amine 252 of N-terminal amino acid 220.

[0151] In an embodiment, with reference to FIG. 11, a process for selectively isolating analyte 212 includes contacting amino acid-specific binder 200 with analyte 212 by incubating amino acid-specific binder with the analyte or analyte within a mixture in a reaction buffer for a time for binding to occur if the analyte includes binding amino acid 210. The process includes selectively binding amino acid-specific binder 200 to N-terminal amino acid 220 of analyte 212 when N-terminal amino acid 220 includes binding amino acid 210 to form isolation complex 244 by incubating them in a reaction buffer for a time for binding to occur. The process also includes separating, e.g., by dialysis, isolation complex 244 from a fluid in which isolation complex 244 is disposed to selectively isolate analyte 212.

[0152] In the process for selectively isolating analyte 212, separating isolation complex 244 from the fluid can include separating isolation complex 244 based on a size of isolation complex 244 relative to a size of other constituents in fluid by dialysis in which the isolation complex is too large to move through a pore but other constituents that the complex is being isolated from communicate through the pore. In an embodiment, the isolation complex is an immunoglobulin fusion, and analyte 212 is phenylalanine. The complex can be isolated by dialysis through, e.g., a 10 kDa molecular weight cutoff membrane. Separating can include precipitating isolation complex 244 from the fluid, ultracentrifuging in a glycerol gradient and separating the gradient fractions, and the like.

[0153] Amino acid-specific binder 200 and processes disclosed herein have numerous beneficial uses, including protein sequencing, peptide fingerprinting, and isolating amino acid analytes. Advantageously, amino acid-specific binder 200 overcomes limitations or technical deficiencies of conventional articles such as the selectivity or specificity for a particular amino acid over similar amino acids. Additionally, amino acid-specific binder 200 has higher affinity combined with high specificity than conventional approaches. As such, amino acid-specific binder 200 can discriminate amino acids for sequencing. Amino acid-specific binder 200 is specific for an N-terminal amino acid rather than an internal residue containing the same amino acid sidechain. Accordingly, amino acid-specific binder 200 determines the identity of the amino acid and a position of the amino acid in a peptide or protein. Additionally, amino acid-specific binder 200 binds a binding amino acid that is not part of a protein or peptide. To circumvent an inability to determine a position of an amino acid (N-terminal, internal, or C-terminal), conventional sequencing or fingerprinting methods rely on a loss of signal if the amino acid being detected is removed from the peptide and interpret a loss of signal at a particular iteration as an indication of position or register within the peptide. A detection scheme that relies on loss of signal is limited when another factor (such as quenching of a signaling fluorophore) also results in a loss of signal. Amino acid-specific binder 200 and tagged complex described herein overcome this limitation by adding a new amino acid-specific binder in each iteration of the sequencing process. By tagging amino acid-specific binder 200 rather than tagging the analyte directly, embodiments herein provide greater signal control and a more universal approach than conventional technology. Embodiments herein produce or detect different types of signals and include a plurality of detection schemes that provide enhanced flexibility in types of substrates and different contexts in which analyte are manipulated.

[0154] Amino acid-specific binder 200 and processes herein unexpectedly isolate analytes from a composition that includes the analyte disposed in a fluid that also includes other constituents such as amino acids, proteins, and the like. Due to the ability to anchor either the analyte or the amino acid-specific binder, the reagent can be used in many different separation processes in addition to sequencing processes.

[0155] The articles and processes herein are illustrated further by the following Example, which is non-limiting.

### EXAMPLE

### Enhanced N-terminal Amino Acid Binding

[0156] Using available scientific literature, it was found that Synechococcus elongatus ClpS demonstrates a preference for binding to peptides with an N-terminal leucine. The distinct sequence features of S. elongatus ClpS were discerned by comparison to other well-characterized ClpS variants and, using the publicly available Pfam database, a list of ClpS variants with sequence features like those of S. elongatus ClpS was compiled Thermosynechococcus elongatus ClpS2 was selected from this list as the variant of greatest experimental interest, due to ease of handling proteins from thermophilic organisms.

[0157] With regard to plasmid construction, wild-type T. elongatus ClpS2 gene was synthesized by GeneArt and cloned into the pET15b vector with an additional His6-tag at the N-terminus of the protein, followed by a Tobacco Etch virus (TEV) protease cleavage site, using the NcoI and XhoI restriction sites.

[0158] With regard to protein purification, the wild-type T. elongatus ClpS2 proteins were expressed in BL21 Escherichia coli cells. Expression was induced with 0.5 mM IPTG when the OD₆₀₀ reached 1.0 and incubated for 16-18 hours at 20° C. The cells were harvested by centrifugation at 5000 g for 20 minutes, and the cell pellets frozen for future use.

[0159] Frozen cell pellets were resuspended in phosphate-buffered saline (pH 7.2) and sonicated with a probe at 20% amplitude for 4 seconds on, 20 seconds off, for 90 minutes, which results in 15 minutes total sonication time. Sonicated material was heated to 60° C. for sixty minutes, then cooled on ice for fifteen minutes. The lysate was centrifuged at 20000 g for 30 minutes and then incubated for one hour with chelating fast flow sepharose resin coated with nickel and pre-equilibrated in lysis buffer. The resin was separated from the lysate by collection on a gravity-flow column. The column was then washed with 10 column volumes (CVs) of PBS, and then S CVs of wash buffer (PBS+50 mM imidazole), before eluting with 5 CVs of elution buffer (PBS+250 mM imidazole). The eluted protein was then loaded onto a S200 26/60 size exclusion chromatography column pre-equilibrated in 2CV of 20 mM HEPES. pH 8. 5 mL Fractions were collected and tracked at 280 nm; peaks were compared with a gel filtration standard and further analyzed by SDS-PAGE. Fractions were combined, concentrated by ultra-centrifugation with a 10 kDa MWCO, centrifuged for 40 minutes at 20,000 g, and measured by the Nanodrop assay.

[0160] The initial binding activity of T. elongatus ClpS2 was characterized using bio-laver interferometry (BLI) In BLI, a functionalized fiber-optic probe is placed in a solution of analyte and the accumulation of analyte on the functional group of the probe is measured by changes in reflected light within the probe. A BLI probe functionalized with streptavidin is allowed to accumulate biotinylated peptide. Probes with peptide are then placed in solutions of ClpS of varying concentration and allowed to equilibrate. BLI response is then graphed to concentration to establish a binding curve. Dilutions of T. elongatus ClpS2 were made in 20 mM HEPES pH 8, 150 mM KCl, 0.1% BSA, and 0.05% Tween-20 at concentrations of 0.312, 0.625, 1.25, 2.5, 5, 10, 20, and 40 μM. Comparison across four peptides that vary only by their N-terminal amino acid show a strong preference for binding leucine.

[0161] The gene was cloned into the pCTCON2 vector for yeast display by amplifying the gene by polymerase chain reaction (PCR) with primers to add the NheI and BamHI sites, and then ligating this to the vector such that the gene is located to the C-terminal end of the aga2-encoding gene, separated by a factor XA cleavage site, an HA-tag and a [GGGGS (Sequence ID No. 14)]×3 spacer. There is also a C-terminal myc-tag before the stop codon. A vector was also created that contains no gene insert, but rather a SacII site and a SpeI site, so that the vector can be linearized at this site for homologous recombination.

[0162] With regard to random mutagenesis library creation, to create the random mutagenesis libraries, error-prone PCR was used. The gene encoding the ClpS protein of interest was amplified using the HA-tag for (CCATACGACGTTCCAGACTAC (Sequence ID No. 15) and T7 (TAATACGACTCACTATAGGG (Sequence ID No. 16) primers in a reaction containing 0.2 mM dATP, 1 mM dCTP, 0.2 mM dGTP, 1 mM dTTP, 10 mM MgCl₂, and 0.5 mM MnCl₂, 1×Taq reaction buffer (20 mM Tris-HCl, pH 8.4, 50 mM KCl) without MgCl₂, and Taq DNA polymerase. The PCR product was used for homologous recombination, as described below. The libraries each contained at least 1 million naïve members, and greater than 50% of the colonies contained at least one mutation from the ten colonies sequenced.

[0163] With regard to Saccharomyces cerevisiae (yeast) transformation. EBY100 strain S. cerevisiae were transformed with pCTCON2 plasmids containing the wild-type ClpS genes using the Frozen EX Yeast Transformation II kit and subsequently grown on selective media as the pCTCON2 plasmid harbors the ability to synthesize tryptophan. Synthetic dextrose media supplemented with casamino acids lacking tryptophan (SD-CAA) and containing 100 μg/mL ampicillin was used to grow all the yeast used in this study. Protein surface expression was induced by resuspending the cells in synthetic galactose media supplemented with casamino acids lacking tryptophan (SG-CAA).

[0164] With regard to site-saturation library creation/homologous recombination in yeast, EBY100 S. cerevisiae cells were grown overnight to an OD₆₀₀ of 3 in YPD media at 30° C. This was used to inoculate a 100 mL culture of YPD to OD₆₀₀ 0.3. After 5 hours, when cells had grown to OD₆₀₀ 1.0, the cells were transferred to 50 ml conical tubes and centrifuged at 3000 g for 3 min at 4° C. The cell pellet was washed twice with 50 mL ice cold sterile water and then washed once with 50 mL ice cold electroporation buffer (1M sorbitol/1 mM CaCl₂)). The cells were conditioned for electroporation by resuspending the cell pellet in 20 mL 0.1 M LiAc, 10 mM DTT and shaking for 30 min at 30 degrees. The cells were centrifuged as above and washed with 25 mL per tube of electroporation buffer before being resuspended in 200 μL of electroporation buffer to reach a final volume of about 1 mL. Cells were kept on ice until electroporation.

[0165] For electroporation, 400 μL of competent cells prepared as above were incubated with the vector and insert, in a 1:3 ratio, and kept on ice for 5 minutes. The vector used was the pCTCON2 plasmid described above containing the clpS gene of interest and digested within the clpS gene with the restriction enzymes NheI and BamHI. The insert used was the error prone PCR library obtained as described above. The cells were then transferred to a 0.2 cm electroporation cuvette and electroporated on the pre-set yeast settings (1.5 kV, 25 μF). The cells were transferred to a tube containing 4 mL of YPD media and 4 mL of 1 M sorbitol and incubated at 30° C. for 1 hour, 225 rpm. The cells were then centrifuged and resuspended in SD-CAA media and dilutions were plated to calculate library size, and the rest was grown in a flask containing 250 mL of SD-CAA media and passaged once before selections or sorting.

[0166] With regard to library selection, fluorescence-activated cell sorting (FACS) was performed using slightly modified protocols from the 2003 Pacific Northwest National Lab Yeast Display ScFV Antibody Library User's Manual and 2004 Methods in Molecular Biology Flow Cytometry Protocols. Yeast displaying a library of mutant ClpS proteins were grown in SD-CAA media overnight at 30° C. until the OD₆₀₀ was approximately 4.0. The yeast was used to inoculate a fresh culture at an OD₆₀₀ of 1.0 in a mixture of 80% SG-CAA/20% SD-CAA and incubated for 24 hours at 20° C. Approximately 109 yeast were washed and resuspended in 1 mL of Dulbecco's phosphate buffered saline containing 0.5% bovine serum albumin (PBS/BSA) (DPBS) containing 100 nM biotinylated peptide at room temperature for 1 hour. The yeast was pelleted by centrifugation at 3000 g for 2 minutes. The cells were then incubated with streptavidin-R-phycoerythrin (PE), and anti-myc AF647 for 30 minutes on ice. A typical reaction contained 1 mL of cells (containing approximately 10⁷ cells), peptide at a concentration of 100 nM, and 25 μL of a master mix containing 2 μL of an anti-myc antibody, 4 μL of the SAPE (streptavidin, R-phycoerythrin conjugate-1 mg/mL) and 19 μL of PBS/BSA for each sample.

[0167] Cells were washed with PBS/BSA, sorted using a FACS Sony SH800 cytometer, and collected in 1 mL of SD-CAA media. The threshold for collection was based on background levels of anti-myc AF647 and streptavidin-R-PE by cells in the absence of peptide. Cells which showed greater than background binding for both metrics in the presence of peptide are grouped in Q2. Q2 Cells were grown out and used to repeat the selection procedure. The number of cells that bound the peptide improved with each round. After three rounds of selection, not only is the count of Q2 cells higher for peptides with leucine, but it did not markedly change for other peptides shown to also bind to T. elongatus ClpS2.

[0168] Cells from the library after three rounds of sorting were lysed by shaking with glass beads. The DNA from the lysate was purified by phenol-chloroform extraction and ethanol precipitation, then the available ClpS genes were amplified using the primers from the previous error-prone PCR. The linear PCR product was sent for Illumina deep sequencing. This produced ˜83,000 sequence reads with 8467 unique amino acid sequences. Based on these sequences, mutational hotspots in the sequence of T. elongatus ClpS2 were identified. For each hotspot, the most statistically prevalent amino acid was identified. The combination of these most prevalent hotspot mutants is predicted to produce a ClpS variant with improved leucine binding activity and selectivity.

[0169] With regard to peptides, all peptides are named by indicating the first two residues, with the full sequence available in Table 3. All of the peptides had the same sequence for the C-terminal end of the peptide, XXAVECK (Sequence ID No. 18), where the N-terminal amino acids are varied. The peptides also contained a biotin linked via the lysine side chain on the C-terminal residue. X1G2 peptides started from a lyophilized form. Peptides were resuspended in 1×DPBS and diluted to the appropriate concentration into the experiment buffer. The peptides were synthesized in-house on a 20 μmol scale on a peptide synthesizer with amino acid reagents and biotin resin. Synthesis resulted in a peptide with an ethylene diamine spacer and then the biotin moiety. The peptide was then cleaved from the resin using 3 mL of trifluoroacetic acid (TFA), phenol, water, and triisopropylsilane (TIPS) in an 88:5:5:2 ratio. The peptide was subsequently rinsed with ice cold ether, pelleted by centrifugation at 4500 g for 10 min at 4° C. and decanted three times. It was then dried under nitrogen overnight at room temperature and subsequently lyophilized and stored at −20° C. until resuspension in the assay buffer.

### EMBODIMENTS INCLUDE

[0170] 1. A binder complex for selectively identifying an amino acid, the binder complex comprising:
[0171] an amino acid-specific binder; and
[0172] an adjunct attached to the amino acid-specific binder,
[0173] wherein the amino acid-specific binder binds selectively to a binding amino acid, and
[0174] the amino acid-specific binder comprises an amino acid sequence comprising:
   [0175] a first amino acid sequence comprising X1-GQQVT-X2-QHVV-X3-K-X4-MI-X5-GGR-X6-E-X7-Y-X8-E;
   [0176] a second amino acid sequence comprising X1-RQQDT-X2-RHVA-X3-M-X4-MT-X5-EGQ-X6-E-X7-Y-X8-E;
   [0177] a third amino acid sequence comprising X1-RQQVA-X2-RHVA-X3-M-X4-MT-X5-EGQ-X6-V-X7-Y-X8-G;
   [0178] a fourth amino acid sequence comprising X1-RQQDT-X2-RHVA-X3-M-X4-KT-X5-EGQ-X6-E-X7-Y-X8-E;
   [0179] a fifth amino acid sequence comprising X1-RQQVT-X2-RHVA-X3-M-X4-MT-X5-KGQ-X6-E-X7-N-X8-E;
   [0180] a sixth amino acid sequence comprising X1-RQQVA-X2-RHVA-X3-M-X4-MT-X5-EGQ-X6-E-X7-Y-X8-E;
   [0181] a seventh amino acid sequence comprising X1-RQQDT-X2-RHVA-X3-M-X4-MT-X5-KGQ-X6-V-X7-Y-X8-G; or
   [0182] an eighth amino acid sequence comprising X1-RQQDT-X2-RHVA-X3-M-X4-MT-X5-EGQ-X6-V-X7-Y-X8-G;
   [0183] wherein;
   [0184] X1 comprises an amino acid sequence comprising ASVVPQE (Sequence ID No. 20);
   [0185] X2 comprises an amino acid sequence comprising

(Sequence ID No. 21
RKHYPNYKVIVLNDDFNTF;

[0186] X3 comprises an amino acid sequence comprising ACL (Sequence ID No. 22);
[0187] X4 comprises an amino acid sequence comprising KYIPN (Sequence ID No. 23);
[0188] X5 comprises an amino acid sequence comprising SDRAWELTNQVHY (Sequence ID No. 24);
[0189] X6 comprises an amino acid sequence comprising AIVWVGPQ (Sequence ID No. 25);
[0190] X7 comprises an amino acid sequence comprising QAEL (Sequence ID No. 26); and
[0191] X8 comprises an amino acid sequence comprising HEQLLRAGLTMAPLEP (Sequence ID No. 27),
[0192] such that a total percentage amount of substitutions and deletions to X1, X2, X3, X4, X5, X6, X7, and X8 is from 0% to less than 30%, exclusive of

(Sequence ID No. 28)
PSVVPQERQQVTRKHYPNYKVIVLNDDFNTFQHVAACLMKYIPNMTSDR
AWELTNQVHYEGQAIVWVGPQEQAELYHEQLLRAGLTMAPLEPE.

[0193] 2. The binder complex of embodiment 1, wherein the amino acid sequence comprises:

(Sequence ID No. 1)
ASVVPQEGQQVTRKHYPNYKVIVLNDDFNTFQHVVACLKKYIPNMISDR
AWELTNQVHYGGRAIVWVGPQEQAELYHEQLLRAGLTMAPLEPE;
(Sequence ID No. 2)
ASVVPQERQQDTRKHYPNYKVIVLNDDENTFRHVAACLMKYIPNMTSDR
AWELTNQVHYEGQAIVWVGPQEQAELYHEQLLRAGLTMAPLEPE;
(Sequence ID No. 3)
ASVVPQERQQVARKHYPNYKVIVLNDDFNTFRHVAACLMKYIPNMTSDR
AWELTNQVHYEGQAIVWVGPQVQAELYHEQLLRAGLTMAPLEPG;
(Sequence ID No. 4)
ASVVPQERQQDTRKHYPNYKVIVLNDDFNTFRHVAACLMKYIPNKTSDR
AWELTNQVHYEGQAIVWVGPQEQAELYHEQLLRAGLTMAPLEPE;
(Sequence ID No. 5)
ASVVPQERQQVTRKHYPNYKVIVLNDDENTFRHVAACLMKYIPNMTSDR
AWELTNQVHYKGQAIVWVGPQEQAELNHEQLLRAGLTMAPLEPE;
(Sequence ID No. 6)
ASVVPQERQQVARKHYPNYKVIVLNDDFNTFRHVAACLMKYIPNMTSDR
AWELTNQVHYEGQAIVWVGPQEQAELYHEQLLRAGLTMAPLEPE;
(Sequence ID No. 7)
ASVVPQERQQDTRKHYPNYKVIVLNDDFNTFRHVAACLMKYIPNMTSDR
AWELTNQVHYKGQAIVWVGPQVQAELYHEQLLRAGLTMAPLEPG;
(Sequence ID No. 8)
ASVVPQERQQDTRKHYPNYKVIVLNDDFNTFRHVAACLMKYIPNMTSDR
AWELTNQVHYEGQAIVWVGPQVQAELYHEQLLRAGLTMAPLEPG;
(Sequence ID No. 9)
ASVVPQEGQQVTRKHYPNYKVIVLNDDFNTFQHVVACLKKYIPNMISDR
AWELTNQVHYGGRAIVWVGPQEQAELNHEQLLRAGLTMAPLEPE;
or
(Sequence ID No. 10)
ASVVPQERQQVARKHYPNYKVIVLNDDFNTFRHVAACLMKYIPNMTSDR
AWELTNQVHYEGQAIVWVGPQVQAELNHEQLLRAGLTMAPLEPE.

[0194] 3. The binder complex of embodiment 1, wherein the adjunct comprises a taggant, a protein, a substrate, or a chemical modifier.
[0195] 4. The binder complex of embodiment 3, wherein the taggant comprises:
[0196] a fluorescent moiety, an electrochemical moiety, or a combination comprising at least one of the foregoing moieties, and the taggant produces a taggant signal in response to receiving a stimulus.
[0197] 5. A process for selectively identifying an N-terminal amino acid, the process comprising:
[0198] providing an analyte comprising a protein, a peptide, an amino acid, or a combination comprising at least one of foregoing;
[0199] contacting a C-terminal end of the analyte with an anchor;
[0200] anchoring the C-terminal end to the anchor to form an anchored analyte;
[0201] contacting an N-terminal amino acid of the anchored analyte with a binder complex, the binder complex comprising:
   [0202] an amino acid-specific binder; and
   [0203] a taggant attached to the amino acid-specific binder;
[0204] selectively binding the amino acid-specific binder of the binder complex to the N-terminal amino acid of the anchored analyte when the N-terminal amino acid comprises a binding amino acid to form a tagged complex;
[0205] subjecting the taggant of the tagged complex to a stimulus;
[0206] producing, by the taggant of the tagged complex, a taggant signal in response to the stimulus;
[0207] detecting the taggant signal; and
[0208] identifying the N-terminal amino acid based on the taggant signal,
[0209] wherein the amino acid-specific binder binds selectively to the binding amino acid, and
[0210] the amino acid-specific binder comprises an amino acid sequence comprising:
[0211] a first amino acid sequence comprising X1-GQQVT-X2-QHVV-X3-K-X4-MI-X5-GGR-X6-E-X7-Y-X8-E;
[0212] a second amino acid sequence comprising X1-RQQDT-X2-RHVA-X3-M-X4-MT-X5-EGQ-X6-E-X7-Y-X8-E;
[0213] a third amino acid sequence comprising X1-RQQVA-X2-RHVA-X3-M-X4-MT-X5-EGQ-X6-V-X7-Y-X8-G;
[0214] a fourth amino acid sequence comprising X1-RQQDT-X2-RHVA-X3-M-X4-KT-X5-EGQ-X6-E-X7-Y-X8-E;
[0215] a fifth amino acid sequence comprising X1-RQQVT-X2-RHVA-X3-M-X4-MT-X5-KGQ-X6-E-X7-N-X8-E;
[0216] a sixth amino acid sequence comprising X1-RQQVA-X2-RHVA-X3-M-X4-MT-X5-EGQ-X6-E-X7-Y-X8-E;
[0217] a seventh amino acid sequence comprising X1-RQQDT-X2-RHVA-X3-M-X4-MT-X5-KGQ-X6-V-X7-Y-X8-G; or
[0218] an eighth amino acid sequence comprising X1-RQQDT-X2-RHVA-X3-M-X4-MT-X5-EGQ-X6-V-X7-Y-X8-G;
[0219] wherein:
[0220] X1 comprises an amino acid sequence comprising ASVVPQE (Sequence ID No. 20);
[0221] X2 comprises an amino acid sequence comprising RKHYPNYKVIVLNDDFNTF (Sequence ID No. 21;
[0222] X3 comprises an amino acid sequence comprising ACL (Sequence ID No. 22);
[0223] X4 comprises an amino acid sequence comprising KYIPN (Sequence ID No. 23);
[0224] X5 comprises an amino acid sequence comprising SDRAWELTNQVHY (Sequence ID No. 24);
[0225] X6 comprises an amino acid sequence comprising AIVWVGPQ (Sequence ID No. 25);
[0226] X7 comprises an amino acid sequence comprising QAEL (Sequence ID No. 26); and
[0227] X8 comprises an amino acid sequence comprising HEQLLRAGLTMAPLEP (Sequence ID No. 27),
   [0228] such that a total percentage amount of substitutions and deletions to X1, X2, X3, X4, X5, X6, X7, and X8 is from 0% to less than 30%, exclusive of

(Sequence ID No. 28)
PSVVPQERQQVTRKHYPNYKVIVLNDDFNTFQHVAACLMKYIPNMTSDR
AWELTNQVHYEGQAIVWVGPQEQAELYHEQLLRAGLTMAPLEPE.

[0229] 6. The process of embodiment 5, wherein the amino acid sequence comprises:

(Sequence ID No. 1)
ASVVPQEGQQVTRKHYPNYKVIVLNDDFNTFQHVVACLKKYIPNMISDR
AWELTNQVHYGGRAIVWVGPQEQAELYHEQLLRAGLTMAPLEPE;
(Sequence ID No. 2)
ASVVPQERQQDTRKHYPNYKVIVLNDDENTFRHVAACLMKYIPNMTSDR
AWELTNQVHYEGQAIVWVGPQEQAELYHEQLLRAGLTMAPLEPE;
(Sequence ID No. 3)
ASVVPQERQQVARKHYPNYKVIVLNDDFNTFRHVAACLMKYIPNMTSDR
AWELTNQVHYEGQAIVWVGPQVQAELYHEQLLRAGLTMAPLEPG;
(Sequence ID No. 4)
ASVVPQERQQDTRKHYPNYKVIVLNDDFNTFRHVAACLMKYIPNKTSDR
AWELTNQVHYEGQAIVWVGPQEQAELYHEQLLRAGLTMAPLEPE;
(Sequence ID No. 5)
ASVVPQERQQVTRKHYPNYKVIVLNDDENTFRHVAACLMKYIPNMTSDR
AWELTNQVHYKGQAIVWVGPQEQAELNHEQLLRAGLTMAPLEPE;
(Sequence ID No. 6)
ASVVPQERQQVARKHYPNYKVIVLNDDFNTFRHVAACLMKYIPNMTSDR
AWELTNQVHYEGQAIVWVGPQEQAELYHEQLLRAGLTMAPLEPE;
(Sequence ID No. 7)
ASVVPQERQQDTRKHYPNYKVIVLNDDFNTFRHVAACLMKYIPNMTSDR
AWELTNQVHYKGQAIVWVGPQVQAELYHEQLLRAGLTMAPLEPG;
(Sequence ID No. 8)
ASVVPQERQQDTRKHYPNYKVIVLNDDFNTFRHVAACLMKYIPNMTSDR
AWELTNQVHYEGQAIVWVGPQVQAELYHEQLLRAGLTMAPLEPG;
(Sequence ID No. 9)
ASVVPQEGQQVTRKHYPNYKVIVLNDDFNTFQHVVACLKKYIPNMISDR
AWELTNQVHYGGRAIVWVGPQEQAELNHEQLLRAGLTMAPLEPE;
or
(Sequence ID No. 10)
ASVVPQERQQVARKHYPNYKVIVLNDDFNTFRHVAACLMKYIPNMTSDR
AWELTNQVHYEGQAIVWVGPQVQAELNHEQLLRAGLTMAPLEPE.

[0230] 7. The process of embodiment 5, further comprising:
[0231] removing the N-terminal amino acid from the anchored analyte so that a penultimate residue becomes the N-terminal amino acid of the anchored analyte;
[0232] contacting the N-terminal amino acid of the anchored analyte with the binder complex;
[0233] selectively binding the amino acid-specific binder of the binder complex to the N-terminal amino acid of the anchored analyte when the N-terminal amino acid is the binding amino acid to form the tagged complex;
[0234] subjecting the taggant of the tagged complex to the stimulus;
[0235] producing, by the taggant of the tagged complex, the taggant signal in response to the stimulus;
[0236] detecting the taggant signal; and
[0237] identifying the N-terminal amino acid based on the taggant signal.
[0238] 8. The process of embodiment 5, further comprising:
[0239] converting the N-terminal amino acid to an inert residue;
[0240] converting a penultimate residue to be the N-terminal amino acid when the inert residue is produced;
[0241] contacting the N-terminal amino acid of the anchored analyte with the binder complex;
[0242] selectively binding the amino acid-specific binder of the binder complex to the N-terminal amino acid of the anchored analyte when the N-terminal amino acid is the binding amino acid to form the tagged complex;
[0243] subjecting the taggant of the tagged complex to the stimulus;
[0244] producing, by the taggant of the tagged complex, the taggant signal in response to the stimulus;
[0245] detecting the taggant signal; and
[0246] identifying the N-terminal amino acid based on the taggant signal.
[0247] 9. The process of embodiment 8, wherein converting the N-terminal amino acid to the inert residue comprises chemically changing the N-terminal amino acid prior to producing the inert residue.
[0248] 10. The process of embodiment 9, wherein chemically changing the N-terminal amino acid prior to producing the inert residue comprises phosphorylating a free amine of the N-terminal amino acid.
[0249] 11. A process for selectively isolating an analyte, the process comprising:
[0250] contacting an amino acid-specific binder with an analyte comprising a protein, a peptide, an amino acid, or a combination comprising at least one of foregoing;
[0251] selectively binding the amino acid-specific binder to the N-terminal amino acid of the analyte when the N-terminal amino acid comprises a binding amino acid to form an isolation complex;
[0252] separating the isolation complex from a fluid in which the isolation complex is disposed to selectively isolating the analyte,
[0253] wherein the amino acid-specific binder binds selectively to the binding amino acid, and
[0254] the amino acid-specific binder comprises an amino acid sequence comprising:
[0255] a first amino acid sequence comprising X1-GQQVT-X2-QHVV-X3-K-X4-MI-X5-GGR-X6-E-X7-Y-X8-E;
[0256] a second amino acid sequence comprising X1-RQQDT-X2-RHVA-X3-M-X4-MT-X5-EGQ-X6-E-X7-Y-X8-E;
[0257] a third amino acid sequence comprising X1-RQQVA-X2-RHVA-X3-M-X4-MT-X5-EGQ-X6-V-X7-Y-X8-G;
[0258] a fourth amino acid sequence comprising X1-RQQDT-X2-RHVA-X3-M-X4-KT-X5-EGQ-X6-E-X7-Y-X8-E;
[0259] a fifth amino acid sequence comprising X1-RQQVT-X2-RHVA-X3-M-X4-MT-X5-KGQ-X6-E-X7-N-X8-E;
[0260] a sixth amino acid sequence comprising X1-RQQVA-X2-RHVA-X3-M-X4-MT-X5-EGQ-X6-E-X7-Y-X8-E;
[0261] a seventh amino acid sequence comprising X1-RQQDT-X2-RHVA-X3-M-X4-MT-X5-KGQ-X6-V-X7-Y-X8-G; or
[0262] an eighth amino acid sequence comprising X1-RQQDT-X2-RHVA-X3-M-X4-MT-X5-EGQ-X6-V-X7-Y-X8-G;
[0263] wherein:
[0264] X1 comprises an amino acid sequence comprising ASVVPQE (Sequence ID No. 20);
[0265] X2 comprises an amino acid sequence comprising RKHYPNYKVIVLNDDFNTF (Sequence ID No. 21;
[0266] X3 comprises an amino acid sequence comprising ACL (Sequence ID No. 22);
[0267] X4 comprises an amino acid sequence comprising KYIPN (Sequence ID No. 23);
[0268] X5 comprises an amino acid sequence comprising SDRAWELTNQVHY (Sequence ID No. 24);
[0269] X6 comprises an amino acid sequence comprising AIVWVGPQ (Sequence ID No. 25);
[0270] X7 comprises an amino acid sequence comprising QAEL (Sequence ID No. 26); and
[0271] X8 comprises an amino acid sequence comprising HEQLLRAGLTMAPLEP (Sequence ID No. 27),
   [0272] such that a total percentage amount of substitutions and deletions to X1, X2, X3, X4, X5, X6, X7, and X8 is from 0% to less than 30%, exclusive of

(Sequence ID No. 28)
PSVVPQERQQVTRKHYPNYKVIVLNDDFNTFQHVAACLMKYIPNMTSDR
AWELTNQVHYEGQAIVWVGPQEQAELYHEQLLRAGLTMAPLEPE.

[0273] 12. The process of embodiment 11, wherein the amino acid sequence comprises:

(Sequence ID No. 1)
ASVVPQEGQQVTRKHYPNYKVIVLNDDFNTFQHVVACLKKYIPNMISDR
AWELTNQVHYGGRAIVWVGPQEQAELYHEQLLRAGLTMAPLEPE;
(Sequence ID No. 2)
ASVVPQERQQDTRKHYPNYKVIVLNDDENTFRHVAACLMKYIPNMTSDR
AWELTNQVHYEGQAIVWVGPQEQAELYHEQLLRAGLTMAPLEPE;
(Sequence ID No. 3)
ASVVPQERQQVARKHYPNYKVIVLNDDFNTFRHVAACLMKYIPNMTSDR
AWELTNQVHYEGQAIVWVGPQVQAELYHEQLLRAGLTMAPLEPG;
(Sequence ID No. 4)
ASVVPQERQQDTRKHYPNYKVIVLNDDFNTFRHVAACLMKYIPNKTSDR
AWELTNQVHYEGQAIVWVGPQEQAELYHEQLLRAGLTMAPLEPE;
(Sequence ID No. 5)
ASVVPQERQQVTRKHYPNYKVIVLNDDENTFRHVAACLMKYIPNMTSDR
AWELTNQVHYKGQAIVWVGPQEQAELNHEQLLRAGLTMAPLEPE;
(Sequence ID No. 6)
ASVVPQERQQVARKHYPNYKVIVLNDDFNTFRHVAACLMKYIPNMTSDR
AWELTNQVHYEGQAIVWVGPQEQAELYHEQLLRAGLTMAPLEPE;
(Sequence ID No. 7)
ASVVPQERQQDTRKHYPNYKVIVLNDDFNTFRHVAACLMKYIPNMTSDR
AWELTNQVHYKGQAIVWVGPQVQAELYHEQLLRAGLTMAPLEPG;
(Sequence ID No. 8)
ASVVPQERQQDTRKHYPNYKVIVLNDDFNTFRHVAACLMKYIPNMTSDR
AWELTNQVHYEGQAIVWVGPQVQAELYHEQLLRAGLTMAPLEPG;
(Sequence ID No. 9)
ASVVPQEGQQVTRKHYPNYKVIVLNDDFNTFQHVVACLKKYIPNMISDR
AWELTNQVHYGGRAIVWVGPQEQAELNHEQLLRAGLTMAPLEPE;
or
(Sequence ID No. 10)
ASVVPQERQQVARKHYPNYKVIVLNDDFNTFRHVAACLMKYIPNMTSDR
AWELTNQVHYEGQAIVWVGPQVQAELNHEQLLRAGLTMAPLEPE.

[0274] 13. The process of embodiment 11, wherein separating the isolation complex from the fluid in which the isolation complex is disposed comprises:
[0275] separating the isolation complex based on a size of the isolation complex relative to a size of other constituents in the fluid;
[0276] precipitating the isolation complex from the fluid;
[0277] centrifuging; or
[0278] a combination comprising at least one of the foregoing separations.
[0279] 14. The process of embodiment 11, wherein the amino acid-specific binder is a member of a binder complex.
[0280] 15. The process of embodiment 14, wherein the binder complex comprises:
[0281] the amino acid-specific binder; and
[0282] an adjunct attached to the amino acid-specific binder.
[0283] 16. The process of embodiment 15, wherein the adjunct comprises a taggant, a protein, a substrate, or a chemical modifier.
[0284] 17. The process of embodiment 16, wherein the taggant comprises:
[0285] a fluorescent moiety, an electrochemical moiety, or a combination comprising at least one of the foregoing moieties, and
[0286] the taggant produces a taggant signal in response to receiving a stimulus.
[0287] 18. The process of embodiment 17, further comprising:
[0288] subjecting the taggant of the isolation complex to a stimulus;
[0289] producing, by the taggant of the isolation complex, a taggant signal in response to the stimulus;
[0290] detecting the taggant signal; and
[0291] identifying the N-terminal amino acid based on the taggant signal.
[0292] 19. The process of embodiment 17, wherein the stimulus comprises a photon; and the taggant signal comprises fluorescence emitted from the taggant.
[0293] 20. The process of embodiment 11, further comprising:
[0294] contacting the amino acid-specific binder with an adjunct to form a binder complex prior to contacting the amino acid-specific binder with the analyte.

What is claimed is:

1. A binder complex for selectively identifying an amino acid, the binder complex comprising:
an amino acid-specific binder; and
an adjunct attached to the amino acid-specific binder,
wherein the amino acid-specific binder binds selectively to a binding amino acid, and
the amino acid-specific binder comprises an amino acid sequence comprising:
a first amino acid sequence comprising X1-GQQVT-X2-QHVV-X3-K-X4-MI-X5-GGR-X6-E-X7-Y-X8-E;
a second amino acid sequence comprising X1-RQQDT-X2-RHVA-X3-M-X4-MT-X5-EGQ-X6-E-X7-Y-X8-E;
a third amino acid sequence comprising X1-RQQVA-X2-RHVA-X3-M-X4-MT-X5-EGQ-X6-V-X7-Y-X8-G;
a fourth amino acid sequence comprising X1-RQQDT-X2-RHVA-X3-M-X4-KT-X5-EGQ-X6-E-X7-Y-X8-E;
a fifth amino acid sequence comprising X1-RQQVT-X2-RHVA-X3-M-X4-MT-X5-KGQ-X6-E-X7-N-X8-E;
a sixth amino acid sequence comprising X1-RQQVA-X2-RHVA-X3-M-X4-MT-X5-EGQ-X6-E-X7-Y-X8-E;
a seventh amino acid sequence comprising X1-RQQDT-X2-RHVA-X3-M-X4-MT-X5-KGQ-X6-V-X7-Y-X8-G; or
an eighth amino acid sequence comprising X1-RQQDT-X2-RHVA-X3-M-X4-MT-X5-EGQ-X6-V-X7-Y-X8-G;
wherein;
X1 comprises an amino acid sequence comprising ASVVPQE (Sequence ID No. 20);
X2 comprises an amino acid sequence comprising
(Sequence ID No. 21)
RKHYPNYKVIVLNDDFNTF;
X3 comprises an amino acid sequence comprising ACL (Sequence ID No. 22);
X4 comprises an amino acid sequence comprising KYIPN (Sequence ID No. 23);
X5 comprises an amino acid sequence comprising SDRAWELTNQVHY (Sequence ID No. 24);
X6 comprises an amino acid sequence comprising AIVWVGPQ (Sequence ID No. 25);
X7 comprises an amino acid sequence comprising QAEL (Sequence ID No. 26); and
X8 comprises an amino acid sequence comprising HEQLLRAGLTMAPLEP (Sequence ID No. 27),
such that a total percentage amount of substitutions and deletions to X1, X2, X3, X4, X5, X6, X7, and X8 is from 0% to less than 30%, exclusive of
(Sequence ID No. 28)
PSVVPQERQQVTRKHYPNYKVIVLNDDENTFQHVAACLMKYIPNMTSDR
AWELTNQVHYEGQAIVWVGPQEQAELYHEQLLRAGLTMAPLEPE.

2. The binder complex of claim 1, wherein the amino acid sequence comprises:
(Sequence ID No. 1)
ASVVPQEGQQVTRKHYPNYKVIVLNDDFNTFQHVVACLKKYIPNMISDR
AWELTNQVHYGGRAIVWVGPQEQAELYHEQLLRAGLTMAPLEPE;
(Sequence ID No. 2)
ASVVPQERQQDTRKHYPNYKVIVLNDDENTFRHVAACLMKYIPNMTSDR
AWELTNQVHYEGQAIVWVGPQEQAELYHEQLLRAGLTMAPLEPE;
(Sequence ID No. 3)
ASVVPQERQQVARKHYPNYKVIVLNDDFNTFRHVAACLMKYIPNMTSDR
AWELTNQVHYEGQAIVWVGPQVQAELYHEQLLRAGLTMAPLEPG;
(Sequence ID No. 4)
ASVVPQERQQDTRKHYPNYKVIVLNDDFNTFRHVAACLMKYIPNKTSDR
AWELTNQVHYEGQAIVWVGPQEQAELYHEQLLRAGLTMAPLEPE;
(Sequence ID No. 5)
ASVVPQERQQVTRKHYPNYKVIVLNDDENTFRHVAACLMKYIPNMTSDR
AWELTNQVHYKGQAIVWVGPQEQAELNHEQLLRAGLTMAPLEPE;
(Sequence ID No. 6)
ASVVPQERQQVARKHYPNYKVIVLNDDFNTFRHVAACLMKYIPNMTSDR
AWELTNQVHYEGQAIVWVGPQEQAELYHEQLLRAGLTMAPLEPE;
(Sequence ID No. 7)
ASVVPQERQQDTRKHYPNYKVIVLNDDFNTFRHVAACLMKYIPNMTSDR
AWELTNQVHYKGQAIVWVGPQVQAELYHEQLLRAGLTMAPLEPG;
(Sequence ID No. 8)
ASVVPQERQQDTRKHYPNYKVIVLNDDFNTFRHVAACLMKYIPNMTSDR
AWELTNQVHYEGQAIVWVGPQVQAELYHEQLLRAGLTMAPLEPG;
(Sequence ID No. 9)
ASVVPQEGQQVTRKHYPNYKVIVLNDDFNTFQHVVACLKKYIPNMISDR
AWELTNQVHYGGRAIVWVGPQEQAELNHEQLLRAGLTMAPLEPE;
or
(Sequence ID No. 10)
ASVVPQERQQVARKHYPNYKVIVLNDDFNTFRHVAACLMKYIPNMTSDR
AWELTNQVHYEGQAIVWVGPQVQAELNHEQLLRAGLTMAPLEPE.

3. The binder complex of claim 1, wherein the adjunct comprises a taggant, a protein, a substrate, or a chemical modifier.

4. The binder complex of claim 3, wherein the taggant comprises:
a fluorescent moiety, an electrochemical moiety, or a combination comprising at least one of the foregoing moieties, and the taggant produces a taggant signal in response to receiving a stimulus.

5. A process for selectively identifying an N-terminal amino acid, the process comprising:
providing an analyte comprising a protein, a peptide, an amino acid, or a combination comprising at least one of foregoing;
contacting a C-terminal end of the analyte with an anchor;
anchoring the C-terminal end to the anchor to form an anchored analyte;
contacting an N-terminal amino acid of the anchored analyte with a binder complex, the binder complex comprising:
an amino acid-specific binder; and
a taggant attached to the amino acid-specific binder;
selectively binding the amino acid-specific binder of the binder complex to the N-terminal amino acid of the anchored analyte when the N-terminal amino acid comprises a binding amino acid to form a tagged complex;
subjecting the taggant of the tagged complex to a stimulus;
producing, by the taggant of the tagged complex, a taggant signal in response to the stimulus;
detecting the taggant signal; and
identifying the N-terminal amino acid based on the taggant signal,
wherein the amino acid-specific binder binds selectively to the binding amino acid, and
the amino acid-specific binder comprises an amino acid sequence comprising:
a first amino acid sequence comprising X1-GQQVT-X2-QHVV-X3-K-X4-MI-X5-GGR-X6-E-X7-Y-X8-E;
a second amino acid sequence comprising X1-RQQDT-X2-RHVA-X3-M-X4-MT-X5-EGQ-X6-E-X7-Y-X8-E;
a third amino acid sequence comprising X1-RQQVA-X2-RHVA-X3-M-X4-MT-X5-EGQ-X6-V-X7-Y-X8-G;
a fourth amino acid sequence comprising X1-RQQDT-X2-RHVA-X3-M-X4-KT-X5-EGQ-X6-E-X7-Y-X8-E;
a fifth amino acid sequence comprising X1-RQQVT-X2-RHVA-X3-M-X4-MT-X5-KGQ-X6-E-X7-N-X8-E;
a sixth amino acid sequence comprising X1-RQQVA-X2-RHVA-X3-M-X4-MT-X5-EGQ-X6-E-X7-Y-X8-E;
a seventh amino acid sequence comprising X1-RQQDT-X2-RHVA-X3-M-X4-MT-X5-KGQ-X6-V-X7-Y-X8-G; or
an eighth amino acid sequence comprising X1-RQQDT-X2-RHVA-X3-M-X4-MT-X5-EGQ-X6-V-X7-Y-X8-G;
wherein:
X1 comprises an amino acid sequence comprising ASVVPQE (Sequence ID No. 20);
X2 comprises an amino acid sequence comprising RKHYPNYKVIVLNDDFNTF (Sequence ID No. 21);
X3 comprises an amino acid sequence comprising ACL (Sequence ID No. 22);
X4 comprises an amino acid sequence comprising KYIPN (Sequence ID No. 23);
X5 comprises an amino acid sequence comprising SDRAWELTNQVHY (Sequence ID No. 24);
X6 comprises an amino acid sequence comprising AIVWVGPQ (Sequence ID No. 25);
X7 comprises an amino acid sequence comprising QAEL (Sequence ID No. 26); and
X8 comprises an amino acid sequence comprising HEQLLRAGLTMAPLEP (Sequence ID No. 27),
such that a total percentage amount of substitutions and deletions to X1, X2, X3, X4, X5, X6, X7, and X8 is from 0% to less than 30%, exclusive of
(Sequence ID No. 28)
PSVVPQERQQVTRKHYPNYKVIVLNDDFNTFQHVAACLMKYIPNMTSDR
AWELTNQVHYEGQAIVWVGPQEQAELYHEQLLRAGLTMAPLEPE.

6. The process of claim 5, wherein the amino acid sequence comprises:
(Sequence ID No. 1)
ASVVPQEGQQVTRKHYPNYKVIVLNDDFNTFQHVVACLKKYIPNMISDR
AWELTNQVHYGGRAIVWVGPQEQAELYHEQLLRAGLTMAPLEPE;
(Sequence ID No. 2)
ASVVPQERQQDTRKHYPNYKVIVLNDDENTFRHVAACLMKYIPNMTSDR
AWELTNQVHYEGQAIVWVGPQEQAELYHEQLLRAGLTMAPLEPE;
(Sequence ID No. 3)
ASVVPQERQQVARKHYPNYKVIVLNDDFNTFRHVAACLMKYIPNMTSDR
AWELTNQVHYEGQAIVWVGPQVQAELYHEQLLRAGLTMAPLEPG;
(Sequence ID No. 4)
ASVVPQERQQDTRKHYPNYKVIVLNDDFNTFRHVAACLMKYIPNKTSDR
AWELTNQVHYEGQAIVWVGPQEQAELYHEQLLRAGLTMAPLEPE;
(Sequence ID No. 5)
ASVVPQERQQVTRKHYPNYKVIVLNDDENTFRHVAACLMKYIPNMTSDR
AWELTNQVHYKGQAIVWVGPQEQAELNHEQLLRAGLTMAPLEPE;
(Sequence ID No. 6)
ASVVPQERQQVARKHYPNYKVIVLNDDFNTFRHVAACLMKYIPNMTSDR
AWELTNQVHYEGQAIVWVGPQEQAELYHEQLLRAGLTMAPLEPE;
(Sequence ID No. 7)
ASVVPQERQQDTRKHYPNYKVIVLNDDFNTFRHVAACLMKYIPNMTSDR
AWELTNQVHYKGQAIVWVGPQVQAELYHEQLLRAGLTMAPLEPG;
(Sequence ID No. 8)
ASVVPQERQQDTRKHYPNYKVIVLNDDFNTFRHVAACLMKYIPNMTSDR
AWELTNQVHYEGQAIVWVGPQVQAELYHEQLLRAGLTMAPLEPG;
(Sequence ID No. 9)
ASVVPQEGQQVTRKHYPNYKVIVLNDDFNTFQHVVACLKKYIPNMISDR
AWELTNQVHYGGRAIVWVGPQEQAELNHEQLLRAGLTMAPLEPE;
or
(Sequence ID No. 10)
ASVVPQERQQVARKHYPNYKVIVLNDDFNTFRHVAACLMKYIPNMTSDR
AWELTNQVHYEGQAIVWVGPQVQAELNHEQLLRAGLTMAPLEPE.

7. The process of claim 5, further comprising:
removing the N-terminal amino acid from the anchored analyte so that a penultimate residue becomes the N-terminal amino acid of the anchored analyte;
contacting the N-terminal amino acid of the anchored analyte with the binder complex;
selectively binding the amino acid-specific binder of the binder complex to the N-terminal amino acid of the anchored analyte when the N-terminal amino acid is the binding amino acid to form the tagged complex;
subjecting the taggant of the tagged complex to the stimulus;
producing, by the taggant of the tagged complex, the taggant signal in response to the stimulus;
detecting the taggant signal; and
identifying the N-terminal amino acid based on the taggant signal.

8. The process of claim 5, further comprising:
converting the N-terminal amino acid to an inert residue;
converting a penultimate residue to be the N-terminal amino acid when the inert residue is produced;
contacting the N-terminal amino acid of the anchored analyte with the binder complex;
selectively binding the amino acid-specific binder of the binder complex to the N-terminal amino acid of the anchored analyte when the N-terminal amino acid is the binding amino acid to form the tagged complex;
subjecting the taggant of the tagged complex to the stimulus;
producing, by the taggant of the tagged complex, the taggant signal in response to the stimulus;
detecting the taggant signal; and
identifying the N-terminal amino acid based on the taggant signal.

9. The process of claim 8, wherein converting the N-terminal amino acid to the inert residue comprises chemically changing the N-terminal amino acid prior to producing the inert residue.

10. The process of claim 9, wherein chemically changing the N-terminal amino acid prior to producing the inert residue comprises phosphorylating a free amine of the N-terminal amino acid.

11. A process for selectively isolating an analyte, the process comprising:
contacting an amino acid-specific binder with an analyte comprising a protein, a peptide, an amino acid, or a combination comprising at least one of foregoing;
selectively binding the amino acid-specific binder to the N-terminal amino acid of the analyte when the N-terminal amino acid comprises a binding amino acid to form an isolation complex;
separating the isolation complex from a fluid in which the isolation complex is disposed to selectively isolating the analyte,
wherein the amino acid-specific binder binds selectively to the binding amino acid, and
the amino acid-specific binder comprises an amino acid sequence comprising:
a first amino acid sequence comprising X1-GQQVT-X2-QHVV-X3-K-X4-MI-X5-GGR-X6-E-X7-Y-X8-E;
a second amino acid sequence comprising X1-RQQDT-X2-RHVA-X3-M-X4-MT-X5-EGQ-X6-E-X7-Y-X8-E;
a third amino acid sequence comprising X1-RQQVA-X2-RHVA-X3-M-X4-MT-X5-EGQ-X6-V-X7-Y-X8-G;
a fourth amino acid sequence comprising X1-RQQDT-X2-RHVA-X3-M-X4-KT-X5-EGQ-X6-E-X7-Y-X8-E;
a fifth amino acid sequence comprising X1-RQQVT-X2-RHVA-X3-M-X4-MT-X5-KGQ-X6-E-X7-N-X8-E;
a sixth amino acid sequence comprising X1-RQQVA-X2-RHVA-X3-M-X4-MT-X5-EGQ-X6-E-X7-Y-X8-E;
a seventh amino acid sequence comprising X1-RQQDT-X2-RHVA-X3-M-X4-MT-X5-KGQ-X6-V-X7-Y-X8-G; or
an eighth amino acid sequence comprising X1-RQQDT-X2-RHVA-X3-M-X4-MT-X5-EGQ-X6-V-X7-Y-X8-G;
wherein:
X1 comprises an amino acid sequence comprising ASVVPQE (Sequence ID No. 20);
X2 comprises an amino acid sequence comprising RKHYPNYKVIVLNDDFNTF (Sequence ID No. 21);
X3 comprises an amino acid sequence comprising ACL (Sequence ID No. 22);
X4 comprises an amino acid sequence comprising KYIPN (Sequence ID No. 23);
X5 comprises an amino acid sequence comprising SDRAWELTNQVHY (Sequence ID No. 24);
X6 comprises an amino acid sequence comprising AIVWVGPQ (Sequence ID No. 25);
X7 comprises an amino acid sequence comprising QAEL (Sequence ID No. 26); and
X8 comprises an amino acid sequence comprising HEQLLRAGLTMAPLEP (Sequence ID No. 27),
such that a total percentage amount of substitutions and deletions to X1, X2, X3, X4, X5, X6, X7, and X8 is from 0% to less than 30%, exclusive of
(Sequence ID No. 28)
PSVVPQERQQVTRKHYPNYKVIVLNDDFNTFQHVAACLMKYIPNMTSDR
AWELTNQVHYEGQAIVWVGPQEQAELYHEQLLRAGLTMAPLEPE.

12. The process of claim 11, wherein the amino acid sequence comprises:
(Sequence ID No. 1)
ASVVPQEGQQVTRKHYPNYKVIVLNDDFNTFQHVVACLKKYIPNMISDR
AWELTNQVHYGGRAIVWVGPQEQAELYHEQLLRAGLTMAPLEPE;
(Sequence ID No. 2)
ASVVPQERQQDTRKHYPNYKVIVLNDDENTFRHVAACLMKYIPNMTSDR
AWELTNQVHYEGQAIVWVGPQEQAELYHEQLLRAGLTMAPLEPE;
(Sequence ID No. 3)
ASVVPQERQQVARKHYPNYKVIVLNDDFNTFRHVAACLMKYIPNMTSDR
AWELTNQVHYEGQAIVWVGPQVQAELYHEQLLRAGLTMAPLEPG;
(Sequence ID No. 4)
ASVVPQERQQDTRKHYPNYKVIVLNDDFNTFRHVAACLMKYIPNKTSDR
AWELTNQVHYEGQAIVWVGPQEQAELYHEQLLRAGLTMAPLEPE;
(Sequence ID No. 5)
ASVVPQERQQVTRKHYPNYKVIVLNDDENTFRHVAACLMKYIPNMTSDR
AWELTNQVHYKGQAIVWVGPQEQAELNHEQLLRAGLTMAPLEPE;
(Sequence ID No. 6)
ASVVPQERQQVARKHYPNYKVIVLNDDFNTFRHVAACLMKYIPNMTSDR
AWELTNQVHYEGQAIVWVGPQEQAELYHEQLLRAGLTMAPLEPE;
(Sequence ID No. 7)
ASVVPQERQQDTRKHYPNYKVIVLNDDFNTFRHVAACLMKYIPNMTSDR
AWELTNQVHYKGQAIVWVGPQVQAELYHEQLLRAGLTMAPLEPG;
(Sequence ID No. 8)
ASVVPQERQQDTRKHYPNYKVIVLNDDFNTFRHVAACLMKYIPNMTSDR
AWELTNQVHYEGQAIVWVGPQVQAELYHEQLLRAGLTMAPLEPG;
(Sequence ID No. 9)
ASVVPQEGQQVTRKHYPNYKVIVLNDDFNTFQHVVACLKKYIPNMISDR
AWELTNQVHYGGRAIVWVGPQEQAELNHEQLLRAGLTMAPLEPE;
or
(Sequence ID No. 10)
ASVVPQERQQVARKHYPNYKVIVLNDDFNTFRHVAACLMKYIPNMTSDR
AWELTNQVHYEGQAIVWVGPQVQAELNHEQLLRAGLTMAPLEPE.

13. The process of claim 11, wherein separating the isolation complex from the fluid in which the isolation complex is disposed comprises:
separating the isolation complex based on a size of the isolation complex relative to a size of other constituents in the fluid;
precipitating the isolation complex from the fluid;
centrifuging; or
a combination comprising at least one of the foregoing separations.

14. The process of claim 11, wherein the amino acid-specific binder is a member of a binder complex.

15. The process of claim 14, wherein the binder complex comprises:
the amino acid-specific binder; and
an adjunct attached to the amino acid-specific binder.

16. The process of claim 15, wherein the adjunct comprises a taggant, a protein, a substrate, or a chemical modifier.

17. The process of claim 16, wherein the taggant comprises:
a fluorescent moiety, an electrochemical moiety, or a combination comprising at least one of the foregoing moieties, and
the taggant produces a taggant signal in response to receiving a stimulus.

18. The process of claim 17, further comprising:
subjecting the taggant of the isolation complex to a stimulus;
producing, by the taggant of the isolation complex, a taggant signal in response to the stimulus;
detecting the taggant signal; and
identifying the N-terminal amino acid based on the taggant signal.

19. The process of claim 17, wherein the stimulus comprises a photon; and
the taggant signal comprises fluorescence emitted from the taggant.

20. The process of claim 11, further comprising:
contacting the amino acid-specific binder with an adjunct to form a binder complex prior to contacting the amino acid-specific binder with the analyte.

The application's sequence listing, which the Patent Office published only in electronic form, follows.

SEQUENCE LISTING (8467 sequences)

SEQ ID NO: 1 - protein, 95 aa, Thermosynechococcus elongatus
ASVVPQEGQQVTRKHYPNYKVIVLNDDFNTFQHVVACLKKYIPNMISDRAWELTNQVHYGGRAIVWVGPQEQAELYHEQLLRAGLTMAPLEPEGS

SEQ ID NO: 2 - protein, 95 aa, Thermosynechococcus elongatus
ASVVPQERQQDTRKHYPNYKVIVLNDDFNTFRHVAACLMKYIPNMTSDRAWELTNQVHYEGQAIVWVGPQEQAELYHEQLLRAGLTMAPLEPEGS

SEQ ID NO: 3 - protein, 95 aa, Thermosynechococcus elongatus
ASVVPQERQQVARKHYPNYKVIVLNDDFNTFRHVAACLMKYIPNMTSDRAWELTNQVHYEGQAIVWVGPQVQAELYHEQLLRAGLTMAPLEPGGS

SEQ ID NO: 4 - protein, 95 aa, Thermosynechococcus elongatus
ASVVPQERQQDTRKHYPNYKVIVLNDDFNTFRHVAACLMKYIPNKTSDRAWELTNQVHYEGQAIVWVGPQEQAELYHEQLLRAGLTMAPLEPEGS

SEQ ID NO: 5 - protein, 95 aa, Thermosynechococcus elongatus
ASVVPQERQQVTRKHYPNYKVIVLNDDFNTFRHVAACLMKYIPNMTSDRAWELTNQVHYKGQAIVWVGPQEQAELNHEQLLRAGLTMAPLEPEGS

SEQ ID NO: 6 - protein, 95 aa, Thermosynechococcus elongatus
ASVVPQERQQVARKHYPNYKVIVLNDDFNTFRHVAACLMKYIPNMTSDRAWELTNQVHYEGQAIVWVGPQEQAELYHEQLLRAGLTMAPLEPEGS

SEQ ID NO: 7 - protein, 95 aa, Thermosynechococcus elongatus
ASVVPQERQQDTRKHYPNYKVIVLNDDFNTFRHVAACLMKYIPNMTSDRAWELTNQVHYEGQAIVWVGPQVQAELYHEQLLRAGLTMAPLEPGGS

SEQ ID NO: 8 - protein, 95 aa, Thermosynechococcus elongatus; identical to SEQ ID NO: 1

SEQ ID NO: 9 - protein, 95 aa, Thermosynechococcus elongatus
ASVVPQERQQVARKHYPNYKVIVLNDDFNTFRHVAACLMKYIPNMTSDRAWELTNQVHYEGQAIVWVGPQVQAELYHEQLLRAGLTMAPLEPEGS

SEQ ID NO: 10 - protein, 95 aa, Thermosynechococcus elongatus
ASVVPQERQQVTRKHHPNYKVIVLNDDFNTFRHVAACLMKYIPNMTSDRAWELTNQVHYEGQAIVWVGPQEQAELYHEQLLRAGLTMAPLEPEGS

SEQ ID NO: 11 - protein, 95 aa, Thermosynechococcus elongatus
ASVVPQEGQQVTRKHYPNYKVIVLNDDFNTFRHVAACLMKYIPNMTSDRAWELTNQVHYEGQAIVWVGPQEQAELYHEQLLRAGLTMAPLEPEGS

SEQ ID NO: 12 - protein, 95 aa, Thermosynechococcus elongatus
ASVVPQERQQDTRKHYPNYKVIVLNDDFNTFQHVVACLKKYIPNMISDRAWELTNQVHYGGRAIVWVGPQEQAELYHEQLLRAGLTMAPLEPEGS

SEQ ID NO: 13 - protein, 95 aa, Thermosynechococcus elongatus
ASVVPQERQQVTRKHYPNYKVIVLNDDFNTFQHVVACLKKYIPNMISDRAWELTNQVHYGGRAIVWVGPQEQAELYHEQLLRAGLTMAPLEPEGS

SEQ ID NO: 14 - protein, 95 aa, Thermosynechococcus elongatus; identical to SEQ ID NO: 2

SEQ ID NO: 15 - protein, 95 aa, Thermosynechococcus elongatus
ASVVPQERQQVTRKHYPNYKVIVLNDDFNTFRHVAACLMKYIPNMTSDRAWELTNQVHYEGQAIVWVGPQEQAELYHEQLLRAGLTMAPLEPEGS

SEQ ID NO: 16 - protein, 95 aa, Thermosynechococcus elongatus
ASVVPQERQQDTRKHYPNYKVIVLNDDFNTFRHVAACLMKYIPNMTSDRAWELTNQVHYEGQAIVWVGPQEQAELYHEQLLRAGLTMAPLEPGGS

SEQ ID NO: 17 - protein, 95 aa, Thermosynechococcus elongatus
ASVVPQEGQQVTRKHYPNYKVIVLNDDFNTFRHVAACLMKYIPNMTSDRAWELTNQVHYKGQAIVWVGPQEQAELNHEQLLRAGLTMAPLEPEGS

SEQ ID NO: 18 - protein, 95 aa, Thermosynechococcus elongatus
ASVVPQERQQDTRKHYPNYKVIVLNDDFNTFRHVAACLMKYIPNMTSDRAWELTNQVHYKGQAIVWVGPQEQAELNHEQLLRAGLTMAPLEPEGS

SEQ ID NO: 19 - protein, 95 aa, Thermosynechococcus elongatus
ASVVPQERQQVARKHYPNYKVIVLNDDFNTFQHVVACLKKYIPNMISDRAWELTNQVHYGGRAIVWVGPQEQAELYHEQLLRAGLTMAPLEPEGS

SEQ ID NO: 20 - protein, 95 aa, Thermosynechococcus elongatus
ASVVPQEGQQVTRKHYPNYKVIVLNDDFNTFRHVAACLMKYIPNMTSDRAWELTNQVHYEGQAIVWVGPQVQAELYHEQLLRAGLTMAPLEPGGS

SEQ ID NO: 21 - protein, 95 aa, Thermosynechococcus elongatus
ASVVPQERQQVARKHYPNYKVIVLNDDFNTFRHVAACLMKYIPNKTSDRAWELTNQVHYEGQAIVWVGPQEQAELYHEQLLRAGLTMAPLEPEGS

SEQ ID NO: 22 - protein, 95 aa, Thermosynechococcus elongatus
ASVVPQEGQQVTRKHYPNYKVIVLNDDFNTFQHVVACLKKYIPNMISDRAWELTNQVHYEGQAIVWVGPQEQAELYHEQLLRAGLTMAPLEPEGS

SEQ ID NO: 23 - protein, 95 aa, Thermosynechococcus elongatus
ASVVPQEGQQVTRKHYPNYKVIVLNDDFNTFRHVAACLMKYIPNKTSDRAWELTNQVHYEGQAIVWVGPQEQAELYHEQLLRAGLTMAPLEPEGS

SEQ ID NO: 24 - protein, 95 aa, Thermosynechococcus elongatus
ASVVPQERQQDTRKHYPNYKVIILNDDFNTFQHVAACLMKYIPNMTSDRAWELTNQVHYEGQAIVRVGPQEQAELYHKQLLRAGLTMAPLEPEGS

SEQ ID NO: 25 - protein, 95 aa, Thermosynechococcus elongatus
ASVVPQERQQVTRKHYPNYKVIVLNDDFNTFRHVAACLMKYIPNMTSDRAWELTNQVHYEGQAIVWVGPQVQAELYHEQLLRAGLTMAPLEPGGS

SEQ ID NO: 26 - protein, 95 aa, Thermosynechococcus elongatus; identical to SEQ ID NO: 9

SEQ ID NO: 27 - protein, 95 aa, Thermosynechococcus elongatus; identical to SEQ ID NO: 4

SEQ ID NO: 28 - protein, 95 aa, Thermosynechococcus elongatus
ASVVPQERQQDTRKHYPNYKVIVLNDDFNTFRHVAACLMKYIPNMTSDRAWELTNQVHYGGRAIVWVGPQEQAELYHEQLLRAGLTMAPLEPEGS

SEQ ID NO: 29 - protein, 95 aa, Thermosynechococcus elongatus
ASVVPQERQQVTRKHYPNYKVIVLNDDFNTFRHVAACLMKYIPNMTSDRAWELTNQVHYEGQAIVWVGPQEQAELYHEQLLRTGLTMAPLEPEGS

SEQ ID NO: 30 - protein, 95 aa, Thermosynechococcus elongatus
ASVVPQEGQQVTRKHYPNYKVIVLNDDFNTFQHVVACLKKYIPNMISDRAWELTNQVHYGGRAIVWVGPQEQAELYHEQLLRAGLTMAPLEPGGS

SEQ ID NO: 31 - protein, 95 aa, Thermosynechococcus elongatus
ASVVPQERQQDTRKHYPNYKVIVLNDDFNTFRHVAACLMKYIPNKTSDRAWELTNQVHYEGQAIVWVGPQEQAELYHEQLLRAGLTMAPLEPGGS

SEQ ID NO: 32 - protein, 95 aa, Thermosynechococcus elongatus
ASVVPQERQQVTRKHYPNYKVIVLNDDFNTFRHVAACLMKYIPNMTSDRAWELTNQVHYEGQAIVWVGPREQAELYHEQLLRVGLTMAPLEPEGS

SEQ ID NO: 33 - protein, 95 aa, Thermosynechococcus elongatus
ASVVPQERQQVTRKHYPNYKVIVLNDDFNTFRHVAACLMKYIPNKTSDRAWELTNQVHYVGQAIVWVGPQERAELYHEQLLRAGLTMAPLEPEGS

SEQ ID NO: 34 - protein, 95 aa, Thermosynechococcus elongatus
ASVVPQERQQVTRKHYPNYKVIVLNDDFNTFRHVAACLMKYIPNKTSDRAWELTNQVHYEGQAIVWVGPQEQAELYHEQLLRAGLTMAPLEPEGS

SEQ ID NO: 35 - protein, 95 aa, Thermosynechococcus elongatus
ASVVPQERQQVARKHYPNYKVIVLNDDFNTFRHVAACLMKYIPNMTSDRAWELTNQVHYKGQAIVWVGPQEQAELNHEQLLRAGLTMAPLEPEGS

SEQ ID NO: 36 - protein, 95 aa, Thermosynechococcus elongatus
ASVVPQERQQVARKHYPNYKVIVLNDDFNTFQHVAACLMKYIPNMTSDRAWELTNQVHYVGQAIVWVGPQEQAELYHEQLLRAGLTMAPLEPKGS

SEQ ID NO: 37 - protein, 95 aa, Thermosynechococcus elongatus
ASVVPQERQQDTRKHYPNYKVIVLNDDFNTFRHVAACLMKYIPNKTSDRAWELTNQVHYEGQAIVWVGPQVQAELYHEQLLRAGLTMAPLEPGGS

SEQ ID NO: 38 - protein, 95 aa, Thermosynechococcus elongatus
ASVVPQERQQVARKHYPNYKVIVLNDDFNTFRHVAACLMKYIPNMTSDRAWELTNQVHYGGRAIVWVGPQEQAELYHEQLLRAGLTMAPLEPEGS

SEQ ID NO: 39 - protein, 95 aa, Thermosynechococcus elongatus; identical to SEQ ID NO: 6

SEQ ID NO: 40 - protein, 95 aa, Thermosynechococcus elongatus
ASVVPQERQQDTRKHYPNYKVIVLNDDFNTFRHVAACLMKYIPNMTSDRAWELTNQVHYEGQAIVWVGPQVQAELYHEQLLRAGLTMAPLEPEGS

SEQ ID NO: 41 - protein, 95 aa, Thermosynechococcus elongatus; identical to SEQ ID NO: 5

SEQ ID NO: 42 - protein, 95 aa, Thermosynechococcus elongatus
ASVVPQERQQDTRKHYPNYKVIVLNDDFNTFRHVAACLMKYIPNMISDRAWELTNQVHYGGRAIVWVGPQEQAELYHEQLLRAGLTMAPLEPEGS

SEQ ID NO: 43 - protein, 95 aa, Thermosynechococcus elongatus
ASVVPQEGQQVTRKHYPNYKVIVLNDDFNTFQHVVACLKKYIPNMISDRAWELTNQVHYKGQAIVWVGPQEQAELNHEQLLRAGLTMAPLEPEGS

SEQ ID NO: 44 - protein, 95 aa, Thermosynechococcus elongatus
ASVVPQERQQDTRKHYPNYKVIVLNDDFNTFRHVAACLKKYIPNMISDRAWELTNQVHYGGRAIVWVGPQEQAELYHEQLLRAGLTMAPLEPEGS

SEQ ID NO: 45 - protein, 95 aa, Thermosynechococcus elongatus; identical to SEQ ID NO: 15

SEQ ID NO: 46 - protein, 95 aa, Thermosynechococcus elongatus
ASVVPQEGQQVTRKHYPNYKVIVLNDDFNTFQHVVACLKKYIPNMISDRAWELTNQVHYEGQAIVWVGPQVQAELYHEQLLRAGLTMAPLEPGGS

SEQ ID NO: 47 - protein, 95 aa, Thermosynechococcus elongatus
ASVVPQERQQVTRKHYPNYKVIVLNDDFNTFRHVAACLMKYIPNMTSDRAWELTNQVHYGGRAIVWVGPQEQAELYHEQLLRAGLTMAPLEPEGS

SEQ ID NO: 48 - protein, 95 aa, Thermosynechococcus elongatus
ASVVPQEGQQVTRKHYPNYKVIVLNDDFNTFQHVVACLKKYIPNMISDRAWELTNQVHYGGRAIVWVGPQVQAELYHEQLLRAGLTMAPLEPGGS

SEQ ID NO: 49 - protein, 95 aa, Thermosynechococcus elongatus
ASVVPQEGQQVTRKHYPNYKVIVLNDDFNTFQHVVACLKKYIPNMISDRAWELTNQVHYGGRAIVWVGPQEQAELNHEQLLRAGLTMAPLEPEGS

SEQ ID NO: 50 - protein, 95 aa, Thermosynechococcus elongatus
ASVVPQEGQQVTRKHYPNYKVIVLNDDFNTFQHVVACLKKYIPNMTSDRAWELTNQVHYEGQAIVWVGPQEQAELYHEQLLRAGLTMAPLEPEGS

SEQ ID NO: 51 - protein, 95 aa, Thermosynechococcus elongatus
ASVVPQERQQDTRKHYPNYKVIVLNDDFNTFRHVAACLMKYIPNKTSDRAWELTNQVHYGGRAIVWVGPQEQAELYHEQLLRAGLTMAPLEPEGS

SEQ ID NO: 52 - protein, 95 aa, Thermosynechococcus elongatus; identical to SEQ ID NO: 18

SEQ ID NO: 53 - protein, 95 aa, Thermosynechococcus elongatus; identical to SEQ ID NO: 15

SEQ ID NO: 54 - protein, 95 aa, Thermosynechococcus elongatus
ASVVPQERQQVARKHYPNYKVIVLNDDFNTFRHVAACLMKYIPNMISDRAWELTNQVHYGGRAIVWVGPQEQAELYHEQLLRAGLTMAPLEPEGS

SEQ ID NO: 55 - protein, 95 aa, Thermosynechococcus elongatus
ASVVPQERQQVTRKHYPNYKVIVLNDDFNTFRHVAACLMKYIPNMTSDRAWELTNQVHYKGQAIVWVGPQEQAELYHEQLLRAGLTMAPLEPEGS

SEQ ID NO: 56 - protein, 95 aa, Thermosynechococcus elongatus; identical to SEQ ID NO: 35

SEQ ID NO: 57 - protein, 95 aa, Thermosynechococcus elongatus; identical to SEQ ID NO: 55

SEQ ID NO: 58 - protein, 95 aa, Thermosynechococcus elongatus
ASVVPQERQQVTRKHYPNYKVIVLNDDFNTFRHVAACLMKYIPNMTSDRAWELTNQVHYKGQAIVWVGPQEQAELNHEQLLRAGLTMAPLEPGGS

SEQ ID NO: 59 - protein, 95 aa, Thermosynechococcus elongatus; identical to SEQ ID NO: 12

SEQ ID NO: 60 - protein, 95 aa, Thermosynechococcus elongatus; identical to SEQ ID NO: 3

SEQ ID NO: 61 - protein, 95 aa, Thermosynechococcus elongatus
ASVVPQEGQQDTRKHYPNYKVIVLNDDFNTFRHVAACLMKYIPNMTSDRAWELTNQVHYEGQAIVWVGPQEQAELYHEQLLRAGLTMAPLEPEGS

SEQ ID NO: 62 - protein, 95 aa, Thermosynechococcus elongatus
ASVVPQERQQVARKHYPNYKVIVLNDDFNTFRHVAACLKKYIPNMISDRAWELTNQVHYGGRAIVWVGPQEQAELYHEQLLRAGLTMAPLEPEGS

SEQ ID NO: 63 - protein, 95 aa, Thermosynechococcus elongatus
ASVVPQERQQDTRKHYPNYKVIVLNDDFNTFRHVVACLKKYIPNMISDRAWELTNQVHYGGRAIVWVGPQEQAELYHEQLLRAGLTMAPLEPEGS

SEQ ID NO: 64 - protein, 95 aa, Thermosynechococcus elongatus
ASVVPQERQQDTRKHYPNYKVIVLNDDFNTFRHVAACLMKYIPNMTSDRAWELTNQVHYEGQAIVWVGPQEQAELYHEQLLRTGLTMAPLEPEGS

SEQ ID NO: 65 - protein, 95 aa, Thermosynechococcus elongatus
ASVVPQERQQVTSKHYPNYKVIVLNDDFNTFRHVAACLMKYIPNMTSDRAWELTNQVHYEGQAIVWVGPQEQAELYHEQLLRAGLTMAPLEPEGS

SEQ ID NO: 66 - protein, 95 aa, Thermosynechococcus elongatus
ASVVPQERQQVARKHYPNYKVIVLNDDFNTFRHVAACLMKYIPNMTSDRAWELTNQVHYEGQAIVWVGPQEQAELYHEQLLRAGLTMAPLEPGGS

SEQ ID NO: 67 - protein, 95 aa, Thermosynechococcus elongatus
ASVVPQERQQDTRKHYPNYKVIVLNDDFNTFRHVAACLMKYIPNMTSDRAWELTNQVHYEGQAIVWVGPQEQAELNHEQLLRAGLTMAPLEPEGS

SEQ ID NO: 68 - protein, 95 aa, Thermosynechococcus elongatus; identical to SEQ ID NO: 13

SEQ ID NO: 69 - protein, 95 aa, Thermosynechococcus elongatus
ASVVPQEGQQVTRKHYPNYKVIVLNDDFNTFQHVVACLKKYIPNMTSDRAWELTNQVHYEGQAIVWVGPQVQAELYHEQLLRAGLTMAPLEPGGS

SEQ ID NO: 70 - protein, 95 aa, Thermosynechococcus elongatus
ASVVPQEGQQVTRKHYPNYKVIVLNDDFNTFQHVVACLMKYIPNMTSDRAWELTNQVHYEGQAIVWVGPQEQAELYHEQLLRAGLTMAPLEPEGS

SEQ ID NO: 71 - protein, 95 aa, Thermosynechococcus elongatus; identical to SEQ ID NO: 30

SEQ ID NO: 72 - protein, 95 aa, Thermosynechococcus elongatus; identical to SEQ ID NO: 11

SEQ ID NO: 73 - protein, 95 aa, Thermosynechococcus elongatus
ASVVPQERQQVTRKHHPNYKVIVLNDDFNTFRHVAACLMKYIPNMTSDRAWELTNQVHYEGQAIVWVGPQVQAELYHEQLLRAGLTMAPLEPGGS

SEQ ID NO: 74 - protein, 95 aa, Thermosynechococcus elongatus; identical to SEQ ID NO: 15

SEQ ID NO: 75 - protein, 95 aa, Thermosynechococcus elongatus
ASVVPQEGQQVTRKHYPNYKVIVLNDDFNTFQHVAACLMKYIPNMTSDRAWELTNQVHYEGQAIVWVGPQEQAELYHEQLLRAGLTMAPLEPEGS

SEQ ID NO: 76 - protein, 95 aa, Thermosynechococcus elongatus
ASVVPQERQQDTRKHYPNYKVIVLNDDFNTFRHVAACLMKYIPNKTSDRAWELTNQVHYKGQAIVWVGPQEQAELNHEQLLRAGLTMAPLEPEGS

SEQ ID NO: 77 - protein, 95 aa, Thermosynechococcus elongatus; identical to SEQ ID NO: 49

SEQ ID NO: 78 - protein, 95 aa, Thermosynechococcus elongatus
ASVVPQERQQVTRKHYPNYKVIVLNDDFNTFRHVAACLKKYIPNMISDRAWELTNQVHYGGRAIVWVGPQEQAELYHEQLLRAGLTMAPLEPEGS

SEQ ID NO: 79 - protein, 95 aa, Thermosynechococcus elongatus; identical to SEQ ID NO: 40

SEQ ID NO: 80 - protein, 95 aa, Thermosynechococcus elongatus; identical to SEQ ID NO: 25

SEQ ID NO: 81 - protein, 95 aa, Thermosynechococcus elongatus
ASVVPQEGQQVTRKHYPNYKVIVLNDDFNTFQHVVACLKKYIPNMISDRAWELTNQVHYGGQAIVWVGPQEQAELYHEQLLRAGLTMAPLEPEGS

SEQ ID NO: 82 - protein, 95 aa, Thermosynechococcus elongatus; identical to SEQ ID NO: 55

SEQ ID NO: 83 - protein, 95 aa, Thermosynechococcus elongatus
ASVVPQEGQQDTRKHYPNYKVIVLNDDFNTFRHVAACLMKYIPNKTSDRAWELTNQVHYEGQAIVWVGPQEQAELYHEQLLRAGLTMAPLEPEGS

SEQ ID NO: 84 - protein, 95 aa, Thermosynechococcus elongatus
ASVVPQEGQQVARKHYPNYKVIVLNDDFNTFRHVAACLMKYIPNMTSDRAWELTNQVHYEGQAIVWVGPQVQAELYHEQLLRAGLTMAPLEPGGS

SEQ ID NO: 85 - protein, 95 aa, Thermosynechococcus elongatus
ASVVPQERQQVTRKHYPNYKVIVLNDDFNTFRHVAACLMKYIPNMISDRAWELTNQVHYGGRAIVWVGPQEQAELYHEQLLRAGLTMAPLEPEGS

SEQ ID NO: 86 - protein, 95 aa, Thermosynechococcus elongatus
ASVVPQEGQQVTRKHYPNYKVIVLNDDFNTFRHVAACLMKYIPNMTSDRAWELTNQVHYGGRAIVWVGPQEQAELYHEQLLRAGLTMAPLEPEGS

SEQ ID NO: 87 - protein, 95 aa, Thermosynechococcus elongatus
ASVVPQERQQVTRKHYPNYKVIVLNDDFNTFRHVAACLMKYIPNMTSDRAWELTNQVHYEGQAIVWVGPQVQAELYHEQLLRAGLTMAPLEPEGS

SEQ ID NO: 88 - protein, 95 aa, Thermosynechococcus elongatus; identical to SEQ ID NO: 47

SEQ ID NO: 89 - protein, 95 aa, Thermosynechococcus elongatus
ASVVPQERQQVARKHYPNYKVIVLNDDFNTFRHVAACLMKYIPNMTSDRAWELTNQVHYEGQAIVWVGPQEQAELYHEQLLRTGLTMAPLEPEGS

SEQ ID NO: 90 - protein, 95 aa, Thermosynechococcus elongatus
ASVVPQERQQVARKHYPNYKVIVLNDDFNTFRHVVACLKKYIPNMISDRAWELTNQVHYGGRAIVWVGPQEQAELYHEQLLRAGLTMAPLEPEGS

SEQ ID NO: 91 - protein, 95 aa, Thermosynechococcus elongatus
ASVVPQERQQVTRKHYPNYKVIVLNDDFNTFRHVAACLMKYNPNMTSDRAWELTNQVHYEGQAIVWVGPQEQAELYHEQLLRAGLTMAPLEPEGS

SEQ ID NO: 92 - protein, 95 aa, Thermosynechococcus elongatus
ASVVPQEGQQVTRKHYPNYKVIVLNDDFNTFQHVVACLMKYIPNMTSDRAWELTNQVHYEGQAIVWVGPQVQAELYHEQLLRAGLTMAPLEPGGS

SEQ ID NO: 93 - protein, 95 aa, Thermosynechococcus elongatus
ASVVPQEGQQVTRKHYPNYKVIVLNDDFNTFRHVAACLMKYIPNMTSDRAWELTNQVHYEGQAIVWVGPQVQAELYHEQLLRAGLTMAPLEPEGS

SEQ ID NO: 94 - protein, 95 aa, Thermosynechococcus elongatus
ASVVPQEGQQVTRKHYPNYKVIVLNDDFNTFQHVVACLKKYIPNKTSDRAWELTNQVHYEGQAIVWVGPQEQAELYHEQLLRAGLTMAPLEPEGS

SEQ ID NO: 95 - protein, 95 aa, Thermosynechococcus elongatus; identical to SEQ ID NO: 67

SEQ ID NO: 96 - protein, 95 aa, Thermosynechococcus elongatus
ASVVPQERQQVARKHYPNYKVIVLNDDFNTFRHVAACLMKYIPNMTSDRAWELTNQVHYEGQAIVWVGPQEQAELNHEQLLRAGLTMAPLEPEGS

SEQ ID NO: 97 - protein, 95 aa, Thermosynechococcus elongatus; identical to SEQ ID NO: 10

SEQ ID NO: 98 - protein, 95 aa, Thermosynechococcus elongatus
ASVVPQERQQVTRKHHPNYKVIVLNDDFNTFRHVAACLMKYIPNMTSDRAWELTNQVHYEGQAIVWVGPQEQAELYHEQLLRAGLTMAPLEPGGS

SEQ ID NO: 99 - protein, 95 aa, Thermosynechococcus elongatus
ASVVPQEGQQVTRKHYPNYKVIVLNDDFNTFQHVVACLKKYIPNMTSDRAWELTNQVHYKGQAIVWVGPQEQAELNHEQLLRAGLTMAPLEPEGS

SEQ ID NO: 100 - protein, 95 aa, Thermosynechococcus elongatus
ASVVPQERQQDTRKHHPNYKVIVLNDDFNTFRHVAACLMKYIPNMTSDRAWELTNQVHYEGQAIVWVGPQEQAELYHEQLLRAGLTMAPLEPEGS

SEQ ID NO: 101 - protein, 95 aa, Thermosynechococcus elongatus
ASVVPQERQQDTRKHYPNYKVIVLNDDFNTFQHVVACLKKYIPNMISDRAWELTNQVHYEGQAIVWVGPQEQAELYHEQLLRAGLTMAPLEPEGS

SEQ ID NO: 102 - protein, 95 aa, Thermosynechococcus elongatus
ASVVPQERQQDTRKHYPNYKVIVLNDDFNTFRHVAACLMKYIPNKTSDRAWELTNQVHYVGQAIVWVGPQERAELYHEQLLRAGLTMAPLEPEGS

SEQ ID NO: 103 - protein, 95 aa, Thermosynechococcus elongatus
ASVVPQERQQVTRKHHPNYKVIVLNDDFNTFRHVAACLMKYIPNKTSDRAWELTNQVHYEGQAIVWVGPQEQAELYHEQLLRAGLTMAPLEPEGS

SEQ ID NO: 104 - protein, 95 aa, Thermosynechococcus elongatus
ASVVPQERQQVARKHYPNYKVIVLNDDFNTFQHVAACLMKYIPNMTSDRAWELTNQVHYVGQAIVWVGPQEQAELYHEQLLRAGLTMAPLEPEGS

SEQ ID NO: 105 - protein, 95 aa, Thermosynechococcus elongatus
ASVVPQERQQVTRKHYPNYKVIVLNDDFNTFRHVAACLMKYIPNMTSDRAWELTNQVHYEGQAIVWVGPQEQAELYHEQLLRAGLTMAPLEPGGS

SEQ ID NO: 106 - protein, 95 aa, Thermosynechococcus elongatus
ASVVPQEGQQVTRKHYPNYKVIVLNDDFNTFRHVAACLMKYIPNMTSDRAWELTNQVHYEGQAIVWVGPREQAELYHEQLLRVGLTMAPLEPEGS

SEQ ID NO: 107 - protein, 95 aa, Thermosynechococcus elongatus; identical to SEQ ID NO: 6

SEQ ID NO: 108 - protein, 95 aa, Thermosynechococcus elongatus; identical to SEQ ID NO: 13

SEQ ID NO: 109 - protein, 95 aa, Thermosynechococcus elongatus
ASVVPQERQQDTRKHYPNYKVIVLNDDFNTFRHVAACLMKYIPNMTSDRAWELTNQVHYEGRAIVWVGPQEQAELYHEQLLRAGLTMAPLEPEGS

SEQ ID NO: 110 - protein, 95 aa, Thermosynechococcus elongatus
ASVVPQEGQQVTRKHYPNYKVIVLNDDFNTFQHVVACLKKYIPNMISDRAWELTNQVHYGGRAIVWVGPQEQAELYHEQLLRAGLTRAPLEPEGS

SEQ ID NO: 111 - protein, 95 aa, Thermosynechococcus elongatus
ASVVPQERQQDTRKHYPNYKVIILNDDFNTFQHVAACLMKYIPNMTSDRAWELTNQVHYEGQAIVWVGPQEQAELYHEQLLRAGLTMAPLEPEGS

SEQ ID NO: 112 - protein, 95 aa, Thermosynechococcus elongatus
ASVVPQERQQDTRKHYPNYKVIVLNDDFNTFQHVVACLKKYIPNMISDRAWELTNQVHYGGRAIVWVGPQEQAELYHEQLLRAGLTMAPLEPGGS

SEQ ID NO: 113 - protein, 95 aa, Thermosynechococcus elongatus
ASVVPQERQQDTRKHYPNYKVIVLNDDFNTFRHVAACLMKYIPNMTSDRAWELTNQVHYEGQAIVWVGPREQAELYHEQLLRVGLTMAPLEPEGS

SEQ ID NO: 114 - protein, 95 aa, Thermosynechococcus elongatus
ASVVPQERQQDTRKHYPNYKVIVLNDDFNTFQHVAACLMKYIPNMTSDRAWELTNQVHYEGQAIVRVGPQEQAELYHKQLLRAGLTMAPLEPEGS

SEQ ID NO: 115 - protein, 95 aa, Thermosynechococcus elongatus; identical to SEQ ID NO: 15

SEQ ID NO: 116 - protein, 95 aa, Thermosynechococcus elongatus; identical to SEQ ID NO: 96

SEQ ID NO: 117 - protein, 95 aa, Thermosynechococcus elongatus
ASVVPQERQQDTRKHYPNYKVIVLNDDFNTFRHVAACLMKYIPNKTSDRAWELTNQVHYEGQAIVWVGPQEQAELNHEQLLRAGLTMAPLEPEGS

SEQ ID NO: 118 - protein, 95 aa, Thermosynechococcus elongatus; identical to SEQ ID NO: 34

SEQ ID NO: 119 - protein, 95 aa, Thermosynechococcus elongatus; identical to SEQ ID NO: 19

SEQ ID NO: 120 - protein, 95 aa, Thermosynechococcus elongatus
ASVVPQEGQQVTRKHYPNYKVIVLNDDFNTFQHVVACLMKYIPNMTSDRAWELTNQVHYKGQAIVWVGPQEQAELNHEQLLRAGLTMAPLEPEGS

SEQ ID NO: 121 - protein, 95 aa, Thermosynechococcus elongatus; identical to SEQ ID NO: 2

SEQ ID NO: 122 - protein, 95 aa, Thermosynechococcus elongatus
ASVVPQEGQQVTRKHYPNYKVIVLNDDFNTFQHVAACLMKYIPNKTSDRAWELTNQVHYEGQAIVWVGPQEQAELYHEQLLRAGLTMAPLEPEGS

SEQ ID NO: 123 - protein, 95 aa, Thermosynechococcus elongatus
ASVVPQEGQQVTRKHYPNYKVIVLNDDFNTFQHVAACLMKYIPNMTSDRAWELTNQVHYKGQAIVWVGPQEQAELNHEQLLRAGLTMAPLEPEGS

SEQ ID NO: 124 - protein, 95 aa, Thermosynechococcus elongatus; identical to SEQ ID NO: 22

SEQ ID NO: 125 - protein, 95 aa, Thermosynechococcus elongatus; identical to SEQ ID NO: 2

SEQ ID NO: 126 - protein, 95 aa, Thermosynechococcus elongatus
ASVVPQEGQQVTRKHYPNYKVIVLNDDFNTFRHVAACLMKYIPNMTSDRAWELTNQVHYEGQAIVWVGPQEQAELYHEQLLRAGLTMAPLEPGGS

SEQ ID NO: 127 - protein, 95 aa, Thermosynechococcus elongatus; identical to SEQ ID NO: 117

SEQ ID NO: 128 - protein, 95 aa, Thermosynechococcus elongatus
ASVVPQERQQDTRKHYPNYKVIVLNDDFNTFRHVAACLMKYIPNMTSDRAWELTNQVHYEGQAIVRVGPQEQAELYHKQLLRAGLTMAPLEPEGS

SEQ ID NO: 129 - protein, 95 aa, Thermosynechococcus elongatus
ASVVPQERQQDTRKHYPNYKVIVLNDDFNTFRHVAACLMKYIPNMTSDRAWELTNQVHYEGQAIVWVGPQEQAELYHEQLLRAGLTRAPLEPEGS

SEQ ID NO: 130 - protein, 95 aa, Thermosynechococcus elongatus
ASVVPQERQQVTRKHYPNYKVIVLNDDFNTFRHVAACLMKYIPNMTSDRAWELTNQVHYEGQAIVWVGPQEQAELYHEQLLRAGLTMASLEPEGS

SEQ ID NO: 131 - protein, 95 aa, Thermosynechococcus elongatus; identical to SEQ ID NO: 55

SEQ ID NO: 132 - protein, 95 aa, Thermosynechococcus elongatus; identical to SEQ ID NO: 19

SEQ ID NO: 133 - protein, 95 aa, Thermosynechococcus elongatus
ASVVPQERQQVTRKHHPNYKVIVLNDDFNTFQHVVACLKKYIPNMISDRAWELTNQVHYGGRAIVWVGPQEQAELYHEQLLRAGLTMAPLEPEGS

SEQ ID NO: 134 - protein, 95 aa, Thermosynechococcus elongatus
ASVVPQEGQQVTRKHYPNYKVIVLNDDFNTFQHVVACLMKYIPNKTSDRAWELTNQVHYEGQAIVWVGPQEQAELYHEQLLRAGLTMAPLEPEGS

SEQ ID NO: 135 - protein, 95 aa, Thermosynechococcus elongatus; identical to SEQ ID NO: 6

SEQ ID NO: 136 - protein, 95 aa, Thermosynechococcus elongatus
ASVVPQERQQDTRKHYPNYKVIVLNDDFNTFRHVAACLMKYIPNMTSDRAWELTNQVHYEGLAIVWVGPQEQAELYHEQLLRAGLTMAPLEPEGS

SEQ ID NO: 137 - protein, 95 aa, Thermosynechococcus elongatus
ASVVPQEGQQVTRKHHPNYKVIVLNDDFNTFRHVAACLMKYIPNMTSDRAWELTNQVHYEGQAIVWVGPQEQAELYHEQLLRAGLTMAPLEPEGS

SEQ ID NO: 138 - protein, 95 aa, Thermosynechococcus elongatus
ASVVPQEGQQVTRKHYPNYKVIVLNDDFNTFRHVVACLKKYIPNMISDRAWELTNQVHYGGRAIVWVGPQEQAELYHEQLLRAGLTMAPLEPEGS

SEQ ID NO: 139 - protein, 95 aa, Thermosynechococcus elongatus
ASVVPQERQQVARKHYPNYKVIVLNDDFNTFRHVAACLMKYIPNMTSDRAWELTNQVHYEGQAIVWVGPQVQAELNHEQLLRAGLTMAPLEPEGS

SEQ ID NO: 140 - protein, 95 aa, Thermosynechococcus elongatus; identical to SEQ ID NO: 38

SEQ ID NO: 141 - protein, 95 aa, Thermosynechococcus elongatus
ASVVPQERQQVTRKHYPNYKVIVLNDDFNTFRHVAACLMKYIPNMTSDRAWELTNQVHYKGQAIVWVGPQEQAELYHEQLLRAGLTMAPLEPGGS

SEQ ID NO: 142 - protein, 95 aa, Thermosynechococcus elongatus
ASVVPQEGQQVTRKHYPNYKVIVLNDDFNTFQHVAACLMKYIPNMTSDRAWELTNQVHYEGQAIVWVGPQVQAELYHEQLLRAGLTMAPLEPGGS

SEQ ID NO: 143 - protein, 95 aa, Thermosynechococcus elongatus
ASVVPQERQQVARKHYPNYKVIVLNDDFNTFRHVAACLMKYIPNMTSDRAWELTNQVHYEGQAIVRVGPQEQAELYHKQLLRAGLTMAPLEPEGS

SEQ ID NO: 144 - protein, 95 aa, Thermosynechococcus elongatus; identical to SEQ ID NO: 2

SEQ ID NO: 145 - protein, 95 aa, Thermosynechococcus elongatus
ASVVPQERQQDTRKHYPNYKVIVLNDDFNTFRHVAACLMKYIPNMTSDRAWELTNQVHYEGQAIVWVGPQEQAELYHEQLLRAGLTMAPLEPKGS

SEQ ID NO: 146 - protein, 95 aa, Thermosynechococcus elongatus
ASVVPQERQQDTRKHYPNYKVIVLNDDFNTFRHVAACLMKYIPNMTSDRAWELTNQVHYKGQAIVWVGPQEQAELYHEQLLRAGLTMAPLEPEGS

SEQ ID NO: 147 - protein, 95 aa, Thermosynechococcus elongatus; identical to SEQ ID NO: 15

SEQ ID NO: 148 - protein, 95 aa, Thermosynechococcus elongatus
ASVVPQEGQQVTRKHYPNYKVIVLNDDFNTFQHVVACLKKYIPNMISDRAWELTNQVHYEGQAIVWVGPQVQAELYHEQLLRAGLTMAPLEPEGS

SEQ ID NO: 149 - protein, 95 aa, Thermosynechococcus elongatus
ASVVPQEGQQVTRKHYPNYKVIVLNDDFNTFQHVVACLKKYIPNMISDRAWELTNQVHYGGQAIVWVGPQVQAELYHEQLLRAGLTMAPLEPGGS

SEQ ID NO: 150 - protein, 95 aa, Thermosynechococcus elongatus
ASVVPQEGQQVTRKHYPNYKVIVLNDDFNTFRHVAACLMKYIPNMTSDRAWELTNQVHYEGQAIVWVGPQEQAELYHEQLLRTGLTMAPLEPEGS

SEQ ID NO: 151 - protein, 95 aa, Thermosynechococcus elongatus
ASVVPQEGQQVTRKHYPNYKVIVLNDDFNTFRHVAACLMKYIPNMISDRAWELTNQVHYGGRAIVWVGPQEQAELYHEQLLRAGLTMAPLEPEGS

SEQ ID NO: 152 - protein, 95 aa, Thermosynechococcus elongatus; identical to SEQ ID NO: 86

SEQ ID NO: 153 - protein, 95 aa, Thermosynechococcus elongatus; identical to SEQ ID NO: 2

SEQ ID NO: 154 - protein, 95 aa, Thermosynechococcus elongatus
ASVVPQERQQVTRKHYPNYKVIVLNDDFNTFRHVAACLMKYIPNMTSDRAWELTNQVHYTGQAIVWVGPQEQAELNHEQLLRAGLTMAPLEPEGS

SEQ ID NO: 155 - protein, 95 aa, Thermosynechococcus elongatus; identical to SEQ ID NO: 104

SEQ ID NO: 156 - protein, 95 aa, Thermosynechococcus elongatus; identical to SEQ ID NO: 11

SEQ ID NO: 157 - protein, 95 aa, Thermosynechococcus elongatus
ASVVPQERQQDTRKHYPNYKVIVLNDDFNTFRHVAACLMKYIPNMTSDRAWELTNQVHYEGQAIVWVGPQEQAELYHEQLLRAGLTMATLEPEGS

SEQ ID NO: 158 - protein, 95 aa, Thermosynechococcus elongatus
ASVVPQERQQVTRKHHPNYKVIVLNDDFNTFRHVAACLMKYIPNMTSDRAWELTNQVHYGGRAIVWVGPQEQAELYHEQLLRAGLTMAPLEPEGS

SEQ ID NO: 159 - protein, 95 aa, Thermosynechococcus elongatus
ASVVPQERQQVTRKHYPNYKVIVLNDDFNTFRHVAACLMKYIPNMTSDRAWELTNQVHYEGQAIVWVGPREQAELYHEQLLRAGLTMAPLEPEGS

SEQ ID NO: 160 - protein, 95 aa, Thermosynechococcus elongatus; identical to SEQ ID NO: 1

SEQ ID NO: 161 - protein, 95 aa, Thermosynechococcus elongatus; identical to SEQ ID NO: 28

SEQ ID NO: 162 - protein, 95 aa, Thermosynechococcus elongatus
ASVVPQERQQVTRKHYPNYKVIVLNDDFNTFRHVVACLKKYIPNMISDRAWELTNQVHYGGRAIVWVGPQEQAELYHEQLLRAGLTMAPLEPEGS

SEQ ID NO: 163 - protein, 95 aa, Thermosynechococcus elongatus; identical to SEQ ID NO: 17

SEQ ID NO: 164 - protein, 95 aa, Thermosynechococcus elongatus; identical to SEQ ID NO: 2

SEQ ID NO: 165 - protein, 95 aa, Thermosynechococcus elongatus
ASVVPQERQQVARKHYPNYKVIVLNDDFNTFRHVAACLMKYIPNMTSDRAWELTNQVHYEGQAIVWVGPQVQAELYHEQLLRAGLTRAPLEPGGS

SEQ ID NO: 166 - protein, 95 aa, Thermosynechococcus elongatus
ASVVPQERQQVARKHYPNYKVIVLNDDFNTFRHVAACLMKYIPNMTSDRAWELTNQVHYEGQAIVWVGPREQAELYHEQLLRVGLTMAPLEPEGS

SEQ ID NO: 167 - protein, 95 aa, Thermosynechococcus elongatus
ASVVPQERQQDTRKHYPNYKVIVLNDDFNTFRHVAACLMKYIPNMTSDRAWELTNQVHYEGQAIVWVGPQEQAELYHEHLLRAGLTMAPLEPEGS

SEQ ID NO: 168 - protein, 95 aa, Thermosynechococcus elongatus
ASVVPQERQQVTRKHYPNYKVIVLNDDFNTFQHVVACLKKYIPNMISDRAWELTNQVHYEGQAIVWVGPQEQAELYHEQLLRAGLTMAPLEPEGS

SEQ ID NO: 169 - protein, 95 aa, Thermosynechococcus elongatus; identical to SEQ ID NO: 99

SEQ ID NO: 170 - protein, 95 aa, Thermosynechococcus elongatus
ASVVPQERQQDTRKHYPNYKVIILNDDFNTFQHVAACLMKYIPNMTSDRAWELTNQVHYEGQAIVRVGPQEQAELYHEQLLRAGLTMAPLEPEGS

SEQ ID NO: 171 - protein, 95 aa, Thermosynechococcus elongatus; identical to SEQ ID NO: 5

SEQ ID NO: 172 - protein, 95 aa, Thermosynechococcus elongatus; identical to SEQ ID NO: 84

SEQ ID NO: 173 - protein, 95 aa, Thermosynechococcus elongatus; identical to SEQ ID NO: 23

SEQ ID NO: 174 - protein, 95 aa, Thermosynechococcus elongatus; identical to SEQ ID NO: 93

SEQ ID NO: 175 - protein, 95 aa, Thermosynechococcus elongatus
ASVVPQERQQDTRKHYPNYKVIVLNDDFNTFQHVAACLMKYIPNMTSDRAWELTNQVHYVGQAIVWVGPQEQAELYHEQLLRAGLTMAPLEPKGS

SEQ ID NO: 176 - protein, 77 aa, Thermosynechococcus elongatus
ASVVPQERQQDTRKHYPNYKVIVLNDDFNTFRHVAACLMKYIPNMTSDRAWELTNQVHYEGQAIVWVGPQEQAELYH

SEQ ID NO: 177 - protein, 95 aa, Thermosynechococcus elongatus
ASVVPQERQQVTRKHHPNYKVIVLNDDFNTFRHVAACLMKYIPNMTSDRAWELTNQVHYKGQAIVWVGPQEQAELNHEQLLRAGLTMAPLEPEGS

SEQ ID NO: 178 - protein, 95 aa, Thermosynechococcus elongatus; identical to SEQ ID NO: 87

SEQ ID NO: 179 - protein, 95 aa, Thermosynechococcus elongatus; identical to SEQ ID NO: 21

SEQ ID NO: 180 - protein, 95 aa, Thermosynechococcus elongatus; identical to SEQ ID NO: 9

SEQ ID NO: 181 - protein, 95 aa, Thermosynechococcus elongatus
ASVVPQEGQQVTRKHYPNYKVIVLNDDFNTFQHVVACLKKYIPNMISDRAWELTNQVHYEGQAIVWVGPQEQAELYHEQLLRAGLTMAPLEPGGS

SEQ ID NO: 182 - protein, 95 aa, Thermosynechococcus elongatus
ASVVPQEGQQVTRKHYPNYKVIVLNDDFNTFQHVVACLKKYIPNMISDRAWELTNQVHYGGRAIVWVGPQEQAELYHEQLLRAGLTMAPLEPKGS

SEQ ID NO: 183 - protein, 95 aa, Thermosynechococcus elongatus
ASVVPQEGQQVTRKHYPNYKVIVLNDDFNTFRHVAACLMKYIPNKTSDRAWELTNQVHYEGQAIVWVGPQVQAELYHEQLLRAGLTMAPLEPGGS

SEQ ID NO: 184 - protein, 95 aa, Thermosynechococcus elongatus; identical to SEQ ID NO: 11

SEQ ID NO: 185 - protein, 95 aa, Thermosynechococcus elongatus
ASVVPQERQQVARKHYPNYKVIILNDDFNTFQHVAACLMKYIPNMTSDRAWELTNQVHYEGQAIVRVGPQEQAELYHKQLLRAGLTMAPLEPEGS

SEQ ID NO: 186 - protein, 95 aa, Thermosynechococcus elongatus; identical to SEQ ID NO: 21

SEQ ID NO: 187 - protein, 95 aa, Thermosynechococcus elongatus
ASVVPQERQQDTRKHYPNYKVIVLNDDFNTFRHVAACLMKYIPNMTSDRAWELTNQVHYEGQAIVLVGPQEQAELYHEQLLRAGLTMAPLEPEGS

SEQ ID NO: 188 - protein, 95 aa, Thermosynechococcus elongatus; identical to SEQ ID NO: 42

SEQ ID NO: 189 - protein, 95 aa, Thermosynechococcus elongatus
ASVVPQERQQDTRKHYPNYKVIVLNDDFNTFRHVAACLMKYIPNMTSDRAWELTNQVHYKGQAIVWVGPQEQAELNHEQLLRAGLTMAPLEPGGS

SEQ ID NO: 190 - protein, 95 aa, Thermosynechococcus elongatus
ASVVPQEGQQVTRKHYPNYKVIVLNDDFNTFQHDVACLKKYIPNMISDRAWELTNQVHYGGRAIVWVGPQEQAELYHEQLLRAGLTMAPLEPEGS

SEQ ID NO: 191 - protein, 95 aa, Thermosynechococcus elongatus
ASVVPQEGQQVTRKHYPNYKVIVLNDDFNTFQHVVACLKKYIPNMISDRAWELTNQVHYGGRAIVWVGPQEQAELYHEQLLRVGLTMAPLEPEGS

SEQ ID NO: 192 - protein, 95 aa, Thermosynechococcus elongatus
ASVVPQEGQQVTRKHYPNYKVIVLNDDFNTFRHVAACLKKYIPNMISDRAWELTNQVHYGGRAIVWVGPQEQAELYHEQLLRAGLTMAPLEPEGS

SEQ ID NO: 193 - protein, 95 aa, Thermosynechococcus elongatus
ASVVPQEGQQVPRKHYPNYKVIVLNDDFNTFQHVVACLKKYIPNMISDRAWELTNQVHYGGRAIVWVGPQEQAELYHEQLLRAGLTMAPLEPEGS

SEQ ID NO: 194 - protein, 95 aa, Thermosynechococcus elongatus
ASVVPQERQQVARKHYPNYKVIVLNDDFNTFRHVAACLMKYIPNKTSDRAWELTNQVHYVGQAIVWVGPQERAELYHEQLLRAGLTMAPLEPEGS

SEQ ID NO: 195 - protein, 95 aa, Thermosynechococcus elongatus
ASVVPQERQQVARKHYPNYKVIVLNDDFNTFRHVAACLMKYIPNMTSDRAWELTNQVHYEGLAIVWVGPQVQAELYHEQLLRAGLTMAPLEPGGS

SEQ ID NO: 196 - protein, 95 aa, Thermosynechococcus elongatus; identical to SEQ ID NO: 44

SEQ ID NO: 197 - protein, 95 aa, Thermosynechococcus elongatus
ASVVPQERQQDTRKHYPNYKVIVLNDDFNTFRHVAACLMKYIPNMTSDRAWELTNQVHYEGQAIVWVGPQEQAELYHEQLLRAGLTLAPLEPEGS

SEQ ID NO: 198 - protein, 95 aa, Thermosynechococcus elongatus; identical to SEQ ID NO: 7

SEQ ID NO: 199 - protein, 95 aa, Thermosynechococcus elongatus
ASVVPQERQQVTRKHYPNYKVIVLNDDFNTFRHVAACLMKYIPNKTSDRAWELTNQVHYGGRAIVWVGPQEQAELYHEQLLRAGLTMAPLEPEGS

SEQ ID NO: 200 - protein, 95 aa, Thermosynechococcus elongatus; identical to SEQ ID NO: 159

SEQ ID NO: 201 - protein, 95 aa, Thermosynechococcus elongatus
ASVVPQERQQVTRKHYPNYKVIVLNDDFNTFRHVAACLMKYIPNMTSDRAWELTNQVHYKGQAIVWVGPQVQAELYHEQLLRAGLTMAPLEPGGS

SEQ ID NO: 202 - protein, 95 aa, Thermosynechococcus elongatus
ASVVPQEGQQDTRKHYPNYKVIVLNDDFNTFQHVVACLKKYIPNMISDRAWELTNQVHYGGRAIVWVGPQEQAELYHEQLLRAGLTMAPLEPEGS

SEQ ID NO: 203 - protein, 95 aa, Thermosynechococcus elongatus
ASVVPQEGQQVTRKHYPNYKVIVLNDDFNTFQHVAACLMKYIPNMTSDRAWELTNQVHYVGQAIVWVGPQEQAELYHEQLLRAGLTMAPLEPKGS

SEQ ID NO: 204 - protein, 95 aa, Thermosynechococcus elongatus
ASVVPQEGQQVTRKHYPNYKVIVLNDDFNTFQHVVACLKKYIPNMISDRAWELTNQVHYGGRAIVWVGPQEQAELYHEQLLRTGLTMAPLEPEGS

SEQ ID NO: 205 - protein, 95 aa, Thermosynechococcus elongatus; identical to SEQ ID NO: 17

SEQ ID NO: 206 - protein, 95 aa, Thermosynechococcus elongatus
ASVVPQERQQVARKHHPNYKVIVLNDDFNTFRHVAACLMKYIPNMTSDRAWELTNQVHYEGQAIVWVGPQEQAELYHEQLLRAGLTMAPLEPEGS

SEQ ID NO: 207 - protein, 95 aa, Thermosynechococcus elongatus
ASVVPQERQQVARKHYPNYKVIVLNDDFNTFRHVAACLMKYIPNMTSDRAWELTNQVHYEGRAIVWVGPQEQAELYHEQLLRAGLTMAPLEPEGS

SEQ ID NO: 208 - protein, 95 aa, Thermosynechococcus elongatus
ASVVPQERQQDTRKHYPNYKVIILNDDFNTFQHVAACLMKYIPNMTSDRAWELTNQVHYEGQAIVWVGPQVQAELYHEQLLRAGLTMAPLEPGGS

SEQ ID NO: 209 - protein, 95 aa, Thermosynechococcus elongatus; identical to SEQ ID NO: 2

SEQ ID NO: 210 - protein, 95 aa, Thermosynechococcus elongatus
ASVVPQERQQDTRKHYPNYKVIVLNDDFNTFQHVAACLMKYIPNMTSDRAWELTNQVHYEGQAIVWVGPQEQAELYHEQLLRAGLTMAPLEPEGS

SEQ ID NO: 211 - protein, 95 aa, Thermosynechococcus elongatus
ASVVPQERQQDTRKHYPNYKVIVLNDDFNTFQHVVACLKKYIPNMISDRAWELTNQVHYEGQAIVWVGPQVQAELYHEQLLRAGLTMAPLEPGGS

SEQ ID NO: 212 - protein, 95 aa, Thermosynechococcus elongatus
ASVVPQERQQDTRKHYPNYKVIVLNDDFNTFRHVAACLMKYIPNKTSDRAWELTNQVHYEGQAIVWVGPQEQAELYHEQLLRAGLTRAPLEPEGS

SEQ ID NO: 213 - protein, 95 aa, Thermosynechococcus elongatus
ASVVPQERQQDTRKHYPNYKVIVLNDDFNTFRHVAACLMKYIPNKTSDRAWELTNQVHYEGQAIVWVGPQVQAELYHEQLLRAGLTMAPLEPEGS

SEQ ID NO: 214 - protein, 95 aa, Thermosynechococcus elongatus
ASVVPQERQQDTRKHYPNYKVIVLNDDFNTFRHVAACLMKYIPNMTSDRAWELTNQVHYEGQAIVWVGPQEQAELYHEQLLRAGLTMAPFEPEGS

SEQ ID NO: 215 - protein, 95 aa, Thermosynechococcus elongatus
ASVVPQERQQDTRKHYPNYKVIVLNDDFNTFRHVAACLMKYIPNMTSDRAWELTNQVHYVGQAIVWVGPQEQAELYHEQLLRAGLTMAPLEPKGS

SEQ ID NO: 216 - protein, 95 aa, Thermosynechococcus elongatus; identical to SEQ ID NO: 18

SEQ ID NO: 217 - protein, 95 aa, Thermosynechococcus elongatus; identical to SEQ ID NO: 10

SEQ ID NO: 218 - protein, 95 aa, Thermosynechococcus elongatus; identical to SEQ ID NO: 34

SEQ ID NO: 219 - protein, 95 aa, Thermosynechococcus elongatus; identical to SEQ ID NO: 201

SEQ ID NO: 220 - protein, 95 aa, Thermosynechococcus elongatus; identical to SEQ ID NO: 15

SEQ ID NO: 221 - protein, 95 aa, Thermosynechococcus elongatus; identical to SEQ ID NO: 47

SEQ ID NO: 222 - protein, 95 aa, Thermosynechococcus elongatus
ASVVPQERQQVARKHYPNYKVIVLNDDFNTFQHVAACLMKYIPNMTSDRAWELTNQVHYEGQAIVWVGPQEQAELYHEQLLRAGLTMAPLEPEGS

SEQ ID NO: 223 - protein, 95 aa, Thermosynechococcus elongatus; identical to SEQ ID NO: 35

SEQ ID NO: 224 - protein, 95 aa, Thermosynechococcus elongatus; identical to SEQ ID NO: 1

SEQ ID NO: 225 - protein, 95 aa, Thermosynechococcus elongatus
ASVVPQEGQQVTRKHYPNYKVIILNDDFNTFQHVAACLMKYIPNMTSDRAWELTNQVHYEGQAIVRVGPQEQAELYHKQLLRAGLTMAPLEPEGS

SEQ ID NO: 226 - protein, 95 aa, Thermosynechococcus elongatus
ASVVPQEGQQVTRKHYPNYKVIVLNDDFNTFRHVAACLMKYIPNKTSDRAWELTNQVHYGGRAIVWVGPQEQAELYHEQLLRAGLTMAPLEPEGS

SEQ ID NO: 227 - protein, 95 aa, Thermosynechococcus elongatus
ASVVPQEGQQVTRKHYPNYKVIVLNDDFNTFRHVAACLMKYIPNKTSDRAWELTNQVHYVGQAIVWVGPQERAELYHEQLLRAGLTMAPLEPEGS

SEQ ID NO: 228 - protein, 95 aa, Thermosynechococcus elongatus
ASVVPQEGQQVTRKHYPNYKVIVLNDDFNTFRHVAACLMKYIPNMTSDRAWELTNQVHYKGQAIVWVGPQEQAELNHEQLLRAGLTMAPLEPGGS

SEQ ID NO: 229 - protein, 95 aa, Thermosynechococcus elongatus; identical to SEQ ID NO: 5

SEQ ID NO: 230 - protein, 95 aa, Thermosynechococcus elongatus; identical to SEQ ID NO: 6

SEQ ID NO: 231 - protein, 95 aa, Thermosynechococcus elongatus
ASVVPQERQQVARKHYPNYKVIVLNDDFNTFRHVAACLMKYIPNKTSDRAWELTNQVHYEGQAIVWVGPQEQAELYHEQLLRAGLTMAPLEPGGS

SEQ ID NO: 232 - protein, 95 aa, Thermosynechococcus elongatus
ASVVPQERQQVARKHYPNYKVIVLNDDFNTFRHVAACLMKYIPNKTSDRAWELTNQVHYEGQAIVWVGPQVQAELYHEQLLRAGLTMAPLEPGGS

SEQ ID NO: 233 - protein, 95 aa, Thermosynechococcus elongatus
ASVVPQERQQDTRKHYPNYKVIILNDDFNTFQHVAACLMKYIPNMTSDRAWELTNQVHYGGRAIVWVGPQEQAELYHEQLLRAGLTMAPLEPEGS

SEQ ID NO: 234 - protein, 95 aa, Thermosynechococcus elongatus
ASVVPQERQQDTRKHYPNYKVIVLNDDFNTFRHVAACLMKYIPNKTSDRAWELTNQVHYEGQAIVWVGPQEQAELYHEQLLRAGLTLAPLEPEGS

SEQ ID NO: 235 - protein, 95 aa, Thermosynechococcus elongatus
ASVVPQERQQDTRKHYPNYKVIVLNDDFNTFRHVAACLMKYIPNMTSDRAWELTNQVHYEGQAIVCVGPQEQAELYHEQLLRAGLTMAPLEPEGS

SEQ ID NO: 236 - protein, 95 aa, Thermosynechococcus elongatus; identical to SEQ ID NO: 177

SEQ ID NO: 237 - protein, 95 aa, Thermosynechococcus elongatus
ASVVPQERQQVTRKHYPNYKVIVLNDDFNTFRHVAACLMKYIPNKTSDRAWELTNQVHYEGQAIVWVGPQEQAELYHEQLLRAGLTMAPLEPGGS

SEQ ID NO: 238 - protein, 95 aa, Thermosynechococcus elongatus; identical to SEQ ID NO: 11

SEQ ID NO: 239 - protein, 77 aa, Thermosynechococcus elongatus
ASVVPQEGQQVTRKHYPNYKVIVLNDDFNTFQHVVACLKKYIPNMISDRAWELTNQVHYGGRAIVWVGPQEQAELYH

SEQ ID NO: 240 - protein, 95 aa, Thermosynechococcus elongatus
ASVVPQEGQQVTRKHYPNYKVIVLNDDFNTFQHVVACLKKYIPNMISDRAWELTNQVHYGGRAIVCVGPQEQAELYHEQLLRAGLTMAPLEPEGS

SEQ ID NO: 241 - protein, 95 aa, Thermosynechococcus elongatus
ASVVPQEGQQVTRKHYPNYKVIVLNDDFNTFQHVVACLKKYIPNMISDRAWELTNQVHFGGRAIVWVGPQEQAELYHEQLLRAGLTMAPLEPEGS

SEQ ID NO: 242 - protein, 95 aa, Thermosynechococcus elongatus
ASVVPQERQQVARKHYPNYKVIVLNDDFNTFQHVVACLKKYIPNMISDRAWELTNQVHYEGQAIVWVGPQEQAELYHEQLLRAGLTMAPLEPEGS

SEQ ID NO: 243 - protein, 95 aa, Thermosynechococcus elongatus
ASVVPQERQQVARKHYPNYKVIVLNDDFNTFRHVAACLMKYIPNMTSDRAWELTNQVHYVGQAIVWVGPQEQAELYHEQLLRAGLTMAPLEPKGS

SEQ ID NO: 244 - protein, 95 aa, Thermosynechococcus elongatus; identical to SEQ ID NO: 4

SEQ ID NO: 245 - protein, 95 aa, Thermosynechococcus elongatus
ASVVPQERQQDTRKHYPNYKVIVLNDDFNTFRHVAACLMKYIPNKTSDRAWELTNQVHYEGQAIVWVCPQEQAELYHEQLLRAGLTMAPLEPEGS

SEQ ID NO: 246 - protein, 95 aa, Thermosynechococcus elongatus; identical to SEQ ID NO: 25

SEQ ID NO: 247 - protein, 95 aa, Thermosynechococcus elongatus
ASVVPQERQQVTRKHHPNYKVIVLNDDFNTFRHVAACLMKYIPNMISDRAWELTNQVHYGGRAIVWVGPQEQAELYHEQLLRAGLTMAPLEPEGS

SEQ ID NO: 248 - protein, 95 aa, Thermosynechococcus elongatus; identical to SEQ ID NO: 133

SEQ ID NO: 249 - protein, 95 aa, Thermosynechococcus elongatus; identical to SEQ ID NO: 73

SEQ ID NO: 250 - protein, 95 aa, Thermosynechococcus elongatus
ASVVPQERQQVTRKHYPNYKVIVLNDDFNTFRHVAACLMKYIPNMTSDRAWELTNQVHYEGQAIVWVGPQEQAELNHEQLLRAGLTMAPLEPEGS

SEQ ID NO: 251 - protein, 95 aa, Thermosynechococcus elongatus
ASVVPQEGQQVTRKHYPNYKGIVLNDDFNTFQHVVACLKKYIPNMISDRAWELTNQVHYGGRAIVWVGPQEQAELYHEQLLRAGLTMAPLEPEGS

SEQ ID NO: 252 - protein, 95 aa, Thermosynechococcus elongatus
ASVVPQEGQQVTRKHYPNYKVRVLNDDFNTFQHVVACLKKYIPNMISDRAWELTNQVHYGGRAIVWVGPQEQAELYHEQLLRAGLTMAPLEPEGS

SEQ ID NO: 253 - protein, 95 aa, Thermosynechococcus elongatus
ASVVPQEGQQVTRKHYPNYKVIVLNDDFNTFQHVAACLMKYIPNMTSDRAWELTNQVHYEGQAIVRVGPQEQAELYHKQLLRAGLTMAPLEPEGS

SEQ ID NO: 254 - protein, 36 aa, Thermosynechococcus elongatus
ASVVPQEGQQVTRKHYPNYKVIVLNDDFNTFQHVVA

SEQ ID NO: 255 - protein, 95 aa, Thermosynechococcus elongatus
ASVVPQEGQQVTRKHYPNYKVIVLNDDFNTFQHVVACLKKYIPNMTSDRAWELTNQVHYGGRAIVWVGPQEQAELYHEQLLRAGLTMAPLEPEGS

SEQ ID NO: 256 - protein, 95 aa, Thermosynechococcus elongatus
ASVVPQEGQQVTRKHYPNYKVIVLNDDFNTFQHVVACLKKYIPNMISDRAWELTNQVHYGGRAIVWVGQQEQAELYHEQLLRAGLTMAPLEPEGS

SEQ ID NO: 257 - protein, 95 aa, Thermosynechococcus elongatus
ASVVPQEGQQVTRKHYPNYKVIVLNDDFNTFQHVVACLKKYIPNMISDRAWELTNQVHYGGRAIVWVGPQEQAELYHEQLLRAGLTMATLEPEGS

SEQ ID NO: 258 - protein, 92 aa, Thermosynechococcus elongatus
ASVVPQEGQQVTRKHYPNYKVIVLNDDFNTFQHVVACLKKYIPNMISDRAWELTNQVHYGGRAIVWVGPQEQAELYHEQLLRAGLTMAPLEP

SEQ ID NO: 259 - protein, 95 aa, Thermosynechococcus elongatus
ASVVPQEGQQVTRKHYPNYKVIVLNDDFNTFQHVVACLKKYIPNMISDRAWELTNQVHYGGRAIVWVGPQEQAELYHEQLLRAGLTMSPLEPEGS

SEQ ID NO: 260 - protein, 95 aa, Thermosynechococcus elongatus; identical to SEQ ID NO: 36

SEQ ID NO: 261 - protein, 95 aa, Thermosynechococcus elongatus
ASVVPQERQQVARKHYPNYKVIVLNDDFNTFRHVAACLMKYIPNKTSDRAWELTNQVHYGGRAIVWVGPQEQAELYHEQLLRAGLTMAPLEPEGS

SEQ ID NO: 262 - protein, 77 aa, Thermosynechococcus elongatus
ASVVPQERQQVARKHYPNYKVIVLNDDFNTFRHVAACLMKYIPNMTSDRAWELTNQVHYEGQAIVWVGPQVQAELYH

SEQ ID NO: 263 - protein, 95 aa, Thermosynechococcus elongatus
ASVVPQERQQDTRKHYPNYKVIVLNDDFNTFQHVVACLKKYIPNMISDRAWELTNQVHYGGRAIVWVGPQVQAELYHEQLLRAGLTMAPLEPGGS

SEQ ID NO: 264 - protein, 95 aa, Thermosynechococcus elongatus; identical to SEQ ID NO: 51

SEQ ID NO: 265 - protein, 95 aa, Thermosynechococcus elongatus
ASVVPQERQQDTRKHYPNYKVIVLNDDFNTFRHVAACLMKYIPNMTSDRACELTNQVHYEGQAIVWVGPQEQAELYHEQLLRAGLTMAPLEPEGS

SEQ ID NO: 266 - protein, 95 aa, Thermosynechococcus elongatus; identical to SEQ ID NO: 28

SEQ ID NO: 267 - protein, 95 aa, Thermosynechococcus elongatus; identical to SEQ ID NO: 33

SEQ ID NO: 268 - protein, 95 aa, Thermosynechococcus elongatus; identical to SEQ ID NO: 33

SEQ ID NO: 269 - protein, 95 aa, Thermosynechococcus elongatus; identical to SEQ ID NO: 87

SEQ ID NO: 270 - protein, 95 aa, Thermosynechococcus elongatus
ASVVPQERQQVTRKHYPNYKVIVLNDDFNTFQHVAACLMKYIPNMTSDRAWELTNQVHYKGQATVWVGPQKQAELYHEQLLRAGLTMAPLEPEGS

SEQ ID NO: 271 - protein, 95 aa, Thermosynechococcus elongatus
ASVVPQEGQQVTRKHYPNYKVIVLNDDFNTFQHVAACLMKYIPNMTSDRAWELTNQVHYEGQAIVWVGPQVQAELYHEQLLRAGLTMAPLEPEGS

SEQ ID NO: 272 - protein, 95 aa, Thermosynechococcus elongatus; identical to SEQ ID NO: 1

SEQ ID NO: 273 - protein, 95 aa, Thermosynechococcus elongatus
ASVVPQEGQQVTRKHYPNYKVIVLNDDFNTFQHVVACLKKYIPNMISDRAWELTNQVHYGGRAIVWVGPQEQAELYHEQLLRAGLTIAPLEPEGS

SEQ ID NO: 274 - protein, 95 aa, Thermosynechococcus elongatus
ASVVPQEGQQVTRKHYPNYKVIVLNDDFNTFQHVVACLKKYIPNMISDRAWELTNQVHYGGRAIVWVGPQEQAELYHEQLLRAGLTLAPLEPEGS

SEQ ID NO: 275 - protein, 95 aa, Thermosynechococcus elongatus
ASVVPQEGQQVTRKHYPNYKVIVLNDDFNTFQHVVACLKKYIPNMISDRAWELTNQVHYGCRAIVWVGPQEQAELYHEQLLRAGLTMAPLEPEGS

SEQ ID NO: 276 - protein, 95 aa, Thermosynechococcus elongatus
ASVVPQEGQQVTRKHYPNYKVIVLNDDFNTFQHVVACLKKYIPNMISDRAWELTNQVHYVGRAIVWVGPQEQAELYHEQLLRAGLTMAPLEPEGS

SEQ ID NO: 277 - protein, 95 aa, Thermosynechococcus elongatus
ASVVPQEGQQVTRKHYPNYKVIVLNDDFNTFRHVAACLMKYIPNKTSDRAWELTNQVHYEGQAIVWVGPQEQAELYHEQLLRAGLTMAPLEPGGS

SEQ ID NO: 278 - protein, 95 aa, Thermosynechococcus elongatus
ASVVPQEGQQVTRKHYPNYKVIVLNDDFNTFRHVAACLMKYIPNMTSDRAWELTNQVHYKGQAIVWVGPQEQAELYHEQLLRAGLTMAPLEPEGS

SEQ ID NO: 279 - protein, 95 aa, Thermosynechococcus elongatus; identical to SEQ ID NO: 1

SEQ ID NO: 280 - protein, 95 aa, Thermosynechococcus elongatus
ASVVPQVRQQDTRKHYPNYKVIVLNDDFNTFRHVAACLMKYIPNMTSDRAWELTNQVHYEGQAIVWVGPQEQAELYHEQLLRAGLTMAPLEPEGS

SEQ ID NO: 281 - protein, 95 aa, Thermosynechococcus elongatus; identical to SEQ ID NO: 62

SEQ ID NO: 282 - protein, 95 aa, Thermosynechococcus elongatus; identical to SEQ ID NO: 3

SEQ ID NO: 283 - protein, 95 aa, Thermosynechococcus elongatus; identical to SEQ ID NO: 6

SEQ ID NO: 284 - protein, 95 aa, Thermosynechococcus elongatus
ASVVPQERQQVARKHYPNYKVIVLNDDFNTFRHVAACLMKYIPNMTSDRAWELTNQVHYKGQAIVWVGPQEQAELYHEQLLRAGLTMAPLEPEGS

SEQ ID NO: 285 - protein, 95 aa, Thermosynechococcus elongatus; identical to SEQ ID NO: 38

SEQ ID NO: 286 - protein, 95 aa, Thermosynechococcus elongatus
ASVVPQERQQVARKHYPNYNVIVLNDDFNTFRHVAACLMKYIPNMTSDRAWELTNQVHYEGQAIVWVGPQVQAELYHEQLLRAGLTMAPLEPGGS

SEQ ID NO: 287 - protein, 95 aa, Thermosynechococcus elongatus
ASVVPQERQQDTRKHYQNYKVIVLNDDFNTFRHVAACLMKYIPNMTSDRAWELTNQVHYEGQAIVWVGPQEQAELYHEQLLRAGLTMAPLEPEGS

SEQ ID NO: 288 - protein, 95 aa, Thermosynechococcus elongatus; identical to SEQ ID NO: 24

SEQ ID NO: 289 - protein, 95 aa, Thermosynechococcus elongatus
ASVVPQERQQDTRKHYPNYKVIILNDDFNTFRHVAACLMKYIPNMTSDRAWELTNQVHYEGQAIVWVGPQEQAELYHEQLLRAGLTMAPLEPEGS

SEQ ID NO: 290 - protein, 95 aa, Thermosynechococcus elongatus
ASVVPQERQQDTRKHYPNYKVIVLNDDFNTFRHVAACLMKYIPNKTSDRAWELTNQVHYEGQAIVWVGPQEQAELYHEQLLRTGLTMAPLEPEGS

SEQ ID NO: 291 - protein, 95 aa, Thermosynechococcus elongatus
ASVVPQERQQDTRKHYPNYKVIVLNDDFNTFRHVAACLMKYIPNKTSDRAWELTNQVHYEGQAIVWVGPQEQAELYHEHLLRAGLTMAPLEPEGS

SEQ ID NO: 292 - protein, 95 aa, Thermosynechococcus elongatus
ASVVPQERQQDTRKHYPNYKVIVLNDDFNTFRHVAACLMKYIPNMTSDRAWELTNQVHYEGQAIVWVGPQEQAELYHKQLLRAGLTMAPLEPEGS

SEQ ID NO: 293 - protein, 95 aa, Thermosynechococcus elongatus
ASVVPQERQQDTRKHYPNYKVIVLNDDFNTFRHVAACLMKYIPNMTSDRAWELTNQVHYEGQAIVWVGPQEQAELYPEQLLRAGLTMAPLEPEGS

SEQ ID NO: 294 - protein, 95 aa, Thermosynechococcus elongatus
ASVVPQERQQDTRKHYPNYKVIVLNDDFNTFRHVAACLMKYIPNMTSDRAWELTNQVHYDGQAIVWVGPQEQAELYHEQLLRAGLTMAPLEPEGS

SEQ ID NO: 295 - protein, 95 aa, Thermosynechococcus elongatus
ASVVPQERQQDTRKHYPNYNVIVLNDDFNTFRHVAACLMKYIPNMTSDRAWELTNQVHYEGQAIVWVGPQEQAELYHEQLLRAGLTMAPLEPEGS

SEQ ID NO: 296 - protein, 95 aa, Thermosynechococcus elongatus
ASVVPQERQQVTRKHHPNYKVIVLNDDFNTFRHVVACLKKYIPNMISDRAWELTNQVHYGGRAIVWVGPQEQAELYHEQLLRAGLTMAPLEPEGS

SEQ ID NO: 297 - protein, 95 aa, Thermosynechococcus elongatus
ASVVPQERQQVTRKHYPNYKVIVLNDDFNTFRHVAACLMKYIPNMTSDRAWELTNQVHYEGQAIVWVGPQEQAELYHEQLLRTGLTMAPLEPGGS

SEQ ID NO: 298 - protein, 95 aa, Thermosynechococcus elongatus
ASVVPQEGQKVTRKHYPNYKVIVLNDDFNTFQHVVACLKKYIPNMISDRAWELTNQVHYGGRAIVWVGPQEQAELYHEQLLRAGLTMAPLEPEGS

SEQ ID NO: 299 - protein, 95 aa, Thermosynechococcus elongatus
ASVVPQEGQQDTRKHYPNYKVIVLNDDFNTFRHVAACLMKYIPNMTSDRAWELTNQVHYEGQAIVWVGPQVQAELYHEQLLRAGLTMAPLEPGGS

SEQ ID NO: 300 - protein, 95 aa, Thermosynechococcus elongatus
ASVVPQEGQQVTRKHYTNYKVIVLNDDFNTFQHVVACLKKYIPNMISDRAWELTNQVHYGGRAIVWVGPQEQAELYHEQLLRAGLTMAPLEPEGS

SEQ ID NO: 301 - protein, 95 aa, Thermosynechococcus elongatus
ASVVPQEGQQVTRKHYQNYKVIVLNDDFNTFQHVVACLKKYIPNMISDRAWELTNQVHYGGRAIVWVGPQEQAELYHEQLLRAGLTMAPLEPEGS

SEQ ID NO: 302 - protein, 95 aa, Thermosynechococcus elongatus
ASVVPQEGQQVTRKHYPNYKVIVLNDDFNTFQHVVACLKKYIPNMISDRAWELTNQVHYGGRAIVWVGPQEQAELYHELLLRAGLTMAPLEPEGS

SEQ ID NO: 303 - protein, 95 aa, Thermosynechococcus elongatus
ASVVPQEGQQVTRKHYPNYKVIVLNDDFNTFQHVVACLKKYIPNMISDRAWELTNQVHYGGRAIVWVGPQVQAELYHEQLLRAGLTMAPLEPEGS

SEQ ID NO: 304 - protein, 95 aa, Thermosynechococcus elongatus
ASVVPQEGQQVTRKHYPNYKVIVLNDDFNTFQHVVACLKKYIPNMISDRACELTNQVHYGGRAIVWVGPQEQAELYHEQLLRAGLTMAPLEPEGS

SEQ ID NO: 305 - protein, 95 aa, Thermosynechococcus elongatus
ASVVPQEGQQVTRKHYPNYKVIVLNDDFNTFQHVVACLKKYIPNMISDRALELTNQVHYGGRAIVWVGPQEQAELYHEQLLRAGLTMAPLEPEGS

SEQ ID NO: 306 - protein, 95 aa, Thermosynechococcus elongatus
ASVVPQEGQQVTRNHYPNYKVIVLNDDFNTFQHVVACLKKYIPNMISDRAWELTNQVHYGGRAIVWVGPQEQAELYHEQLLRAGLTMAPLEPEGS

SEQ ID NO: 307 - protein, 95 aa, Thermosynechococcus elongatus
ASVVPQERQQVARKHYQNYKVIVLNDDFNTFRHVAACLMKYIPNMTSDRAWELTNQVHYEGQAIVWVGPQVQAELYHEQLLRAGLTMAPLEPGGS

SEQ ID NO: 308 - protein, 95 aa, Thermosynechococcus elongatus
ASVVPQERQQVARKHYPNYKVIVLNDDFNTFRHVAACLMKYIPNMTSDRAWELTNQVHYEGQAIVWVGPQVQAELYHEQLLRAGLTMATLEPGGS

SEQ ID NO: 309 - protein, 90 aa, Thermosynechococcus elongatus
ASVVPQERQQVARKHYPNYKVIVLNDDFNTFRHVAACLMKYIPNMTSDRAWELTNQVHYEGQAIVWVGPQVQAELYHEQLLRAGLTMAPL

SEQ ID NO: 310 - protein, 95 aa, Thermosynechococcus elongatus
ASVVPQERQQVARKHYPNYKVIVLNDDFNTFRHVAACLMKYIPNMTSDRAWELTNQVHYEGQAIVWVGPQVQAELYHEQLLRACLTMAPLEPGGS

SEQ ID NO: 311 - protein, 95 aa, Thermosynechococcus elongatus
ASVVPQERQQVARKHYPNYKVIVLNDDFNTFRHVAACLMKYIPNMTSDRALELTNQVHYEGQAIVWVGPQVQAELYHEQLLRAGLTMAPLEPGGS

SEQ ID NO: 312 - protein, 95 aa, Thermosynechococcus elongatus; identical to SEQ ID NO: 35

SEQ ID NO: 313 - protein, 95 aa, Thermosynechococcus elongatus
ASVVPQERQQDTRKHYPNYKVIILNDDFNTFQHVVACLKKYIPNMISDRAWELTNQVHYGGRAIVWVGPQEQAELYHEQLLRAGLTMAPLEPEGS

SEQ ID NO: 314 - protein, 95 aa, Thermosynechococcus elongatus
ASVVPQERQQDTRKHYPNYKVIVLNDDFNTFRHVAACLMKYIPNKTSDRAWELTNQVHYEGQAIVWVGPQEQAELYHEQLLRAGLTMAPLEPKGS

SEQ ID NO: 315 - protein, 95 aa, Thermosynechococcus elongatus
ASVVPQERQQDTRKHYPNYKVIVLNDDFNTFRHVAACLMKYIPNKTSDRAWELTNQVHYEGRAIVWVGPQEQAELYHEQLLRAGLTMAPLEPEGS

SEQ ID NO: 316 - protein, 95 aa, Thermosynechococcus elongatus
ASVVPQERQQDTRKHYPNYKVIVLNDDFNTFRHVAACLMKYIPNMTSDRAWELTNQVHYEGQAIVWVGPQEQAELYHEQLLRAGLTMASLEPEGS

SEQ ID NO: 317 - protein, 95 aa, Thermosynechococcus elongatus
ASVVPQERQQDTRKHYPNYKVIVLNDDFNTFRHVAACLMKYIPNMISDRAWELTNQVHYEGQAIVWVGPQEQAELYHEQLLRAGLTMAPLEPEGS

SEQ ID NO: 318 - protein, 95 aa, Thermosynechococcus elongatus
ASVVPQERQQDTRKHYPNYKVIVLNDDFNTFLHVAACLMKYIPNMTSDRAWELTNQVHYEGQAIVWVGPQEQAELYHEQLLRAGLTMAPLEPEGS

SEQ ID NO: 319 - protein, 95 aa, Thermosynechococcus elongatus; identical to SEQ ID NO: 13

SEQ ID NO: 320 - protein, 95 aa, Thermosynechococcus elongatus
ASVVPQERQQVTRKHYPNYKVIVLNDDFNTFRHVAACLMKYIPNKTSDRAWELTNQVHYVGQAIVWVGPQERAELYHEQLLRAGLTMAPLEPGGS

SEQ ID NO: 321 - protein, 95 aa, Thermosynechococcus elongatus
ASVVPQERQQVTRKHYPNYKVIILNDDFNTFQHVAACLMKYIPNMTSDRAWELTNQVHYEGQAIVRVGPQEQAELYHKQLLRAGLTMAPLEPEGS

SEQ ID NO: 322 - protein, 95 aa, Thermosynechococcus elongatus
ASVVPQERQQVTRKHYPNYKVIVLNDDFNTFQHVVACLKKYIPNMISDRAWELTNQVHYGGRAIVWVGPQVQAELYHEQLLRAGLTMAPLEPGGS

SEQ ID NO: 323 - protein, 95 aa, Thermosynechococcus elongatus; identical to SEQ ID NO: 32

SEQ ID NO: 324 - protein, 95 aa, Thermosynechococcus elongatus
ASVVPQEGQQVTRKHYPNYKVIVLNDDFNTLQHVVACLKKYIPNMISDRAWELTNQVHYGGRAIVWVGPQEQAELYHEQLLRAGLTMAPLEPEGS

SEQ ID NO: 325 - protein, 95 aa, Thermosynechococcus elongatus
ASVVPQEGQQVTRKHYPNYKVIVLNDDFNTFQHVVACLKKYIQNMISDRAWELTNQVHYGGRAIVWVGPQEQAELYHEQLLRAGLTMAPLEPEGS

SEQ ID NO: 326 - protein, 95 aa, Thermosynechococcus elongatus
ASVVPQEGQQVTRKHYPNYKVIVLNDDFNTFQHVVACLKKYIPNMISDRAWELTNQVNYGGRAIVWVGPQEQAELYHEQLLRAGLTMAPLEPEGS

SEQ ID NO: 327 - protein, 95 aa, Thermosynechococcus elongatus
ASVVPQEGQQVTRKHYPNYKVIVLNDDFNTFQHVVACLKKYIPNMISDRAWELTNQVHYEGQAIVWVGPREQAELYHEQLLRVGLTMAPLEPEGS

SEQ ID NO: 328 - protein, 95 aa, Thermosynechococcus elongatus
ASVVPQEGQQVTRKHYPNYKVIVLNDDFNTFQHVVACLKKYIPNMISDRAWELTNQVHYGGRAIVWVGPQEQAELYHEQLLRAGLTMAQLEPEGS

SEQ ID NO: 329 - protein, 95 aa, Thermosynechococcus elongatus; identical to SEQ ID NO: 303

SEQ ID NO: 330 - protein, 95 aa, Thermosynechococcus elongatus
ASVVPQEGQQVTRKHYPNYKVIVLNDDFNTFQHVVACLKKYIPNMISDRAWELTNQVHYGGRAIVWVCPQEQAELYHEQLLRAGLTMAPLEPEGS

SEQ ID NO: 331 - protein, 95 aa, Thermosynechococcus elongatus; identical to SEQ ID NO: 11

SEQ ID NO: 332 - protein, 95 aa, Thermosynechococcus elongatus
ASVVPQEGQQVTRKHYPNYKVIVLNDDFNTFRHVAACLMKYIPNMTSDRAWELTNQVHYEGRAIVWVGPQEQAELYHEQLLRAGLTMAPLEPEGS

SEQ ID NO: 333 - protein, 95 aa, Thermosynechococcus elongatus; identical to SEQ ID NO: 1

SEQ ID NO: 334 - protein, 7 aa, Thermosynechococcus elongatus
ASVVPQE

SEQ ID NO: 335 - protein, 95 aa, Thermosynechococcus elongatus
ASVVPQERQQVARKHYPNYKVIVLNDDFNTFQHVVACLKKYIPNMISDRAWELTNQVHYEGQAIVWVGPQVQAELYHEQLLRAGLTMAPLEPGGS

SEQ ID NO: 336 - protein, 95 aa, Thermosynechococcus elongatus
ASVVPQERQQVARKHYPNYKVIVLNDDFNTFRHVAACLMKYIPNMTSDRAWELTNQGHYEGQAIVWVGPQVQAELYHEQLLRAGLTMAPLEPGGS

SEQ ID NO: 337 - protein, 95 aa, Thermosynechococcus elongatus
ASVVPQERQQVARKHYPNYKVIVLNDDFNTFRHVAACLMKYIPNMTSDRAWELTNQVHYEGQAIVWVGPQVQAELYHEQLLRAGLTMAPLEPKGS

SEQ ID NO: 338 - protein, 95 aa, Thermosynechococcus elongatus
ASVVPQERQQVARKHYPNYKVIVLNDDFNTFRHVAACLMKYIPNMTSDRAWELTNQVHYEGQAIVWVGPQVQAELYHEQLLRAGLTIAPLEPGGS

SEQ ID NO: 339 - protein, 95 aa, Thermosynechococcus elongatus
ASVVPQERQQVARKHYPNYKVIVLNDDFNTFRHVAACLMKYIPNMTSDRAWELTNQVHYEGQAIVCVGPQVQAELYHEQLLRAGLTMAPLEPGGS

SEQ ID NO: 340 - protein, 95 aa, Thermosynechococcus elongatus; identical to SEQ ID NO: 284

SEQ ID NO: 341 - protein, 95 aa, Thermosynechococcus elongatus; identical to SEQ ID NO: 2

SEQ ID NO: 342 - protein, 95 aa, Thermosynechococcus elongatus; identical to SEQ ID NO: 170

SEQ ID NO: 343 - protein, 95 aa, Thermosynechococcus elongatus
ASVVPQERQQDTRKHYPNYKVIVLNDDFNTFQHVVACLMKYIPNMTSDRAWELTNQVHYEGQAIVWVGPQEQAELYHEQLLRAGLTMAPLEPEGS

SEQ ID NO: 344 - protein, 95 aa, Thermosynechococcus elongatus
ASVVPQERQQDTRKHYPNYKVIVLNDDFNTFRHVAACLMKYIPNMTSDRAWELTNQVHYEGQAIVWVGPQEQAELYHEQVLRAGLTMAPLEPEGS

SEQ ID NO: 345 - protein, 95 aa, Thermosynechococcus elongatus
ASVVPQERQQDTRKHYPNYKVIVLNDDFNTFRHVAACLMKYIPNMTSDRAWELTNQVHYEGQAIVWVGPQEQAELYHEQLVRAGLTMAPLEPEGS

SEQ ID NO: 346 - protein, 95 aa, Thermosynechococcus elongatus
ASVVPQERQQDTRKHYPNYKVIVLNDDFNTFRHVAACLMKYIPNMTSDRAWELTNQVHYEGQAIVWVGPQEQAELYHEQLLRAGLTIAPLEPEGS

SEQ ID NO: 347 - protein, 95 aa, Thermosynechococcus elongatus
ASVVPQERQQDTRKHYPNYKVIVLNDDFNTFRHVAACLMKYIPNMTSDRAWELTNQVHYEGQAIVWVGPQVQAELNHEQLLRAGLTMAPLEPEGS

SEQ ID NO: 348 - protein, 95 aa, Thermosynechococcus elongatus; identical to SEQ ID NO: 109

SEQ ID NO: 349 - protein, 95 aa, Thermosynechococcus elongatus; identical to SEQ ID NO: 146

SEQ ID NO: 350 - protein, 95 aa, Thermosynechococcus elongatus; identical to SEQ ID NO: 63

SEQ ID NO: 351 - protein, 95 aa, Thermosynechococcus elongatus
ASVVPQERQQDPRKHYPNYKVIVLNDDFNTFRHVAACLMKYIPNMTSDRAWELTNQVHYEGQAIVWVGPQEQAELYHEQLLRAGLTMAPLEPEGS

SEQ ID NO: 352 - protein, 95 aa, Thermosynechococcus elongatus
ASVVPQERQQVTRKHYQNYKVIVLNDDFNTFRHVAACLMKYIPNMTSDRAWELTNQVHYKGQAIVWVGPQEQAELNHEQLLRAGLTMAPLEPEGS

SEQ ID NO: 353 - protein, 95 aa, Thermosynechococcus elongatus
ASVVPQERQQVTRKHYPNYKVIVLNDDFNTFQHVVACLKKYIPNMISDRAWELTNQVHYGGRAIVWVGPQEQAELYHEQLLRAGLTMAPLEPGGS

SEQ ID NO: 354 - protein, 95 aa, Thermosynechococcus elongatus; identical to SEQ ID NO: 85

SEQ ID NO: 355 - protein, 95 aa, Thermosynechococcus elongatus
ASVVPQERQQVTRKHYPNYKVIVLNDDFNTFRHVAACLMKYIPNMTSDRAWELTNQVHYKGQAIVWVGPQEQAELNHEQLLRAGLTMAPLEPKGS

SEQ ID NO: 356 - protein, 95 aa, Thermosynechococcus elongatus; identical to SEQ ID NO: 65

SEQ ID NO: 357 - protein, 95 aa, Thermosynechococcus elongatus
ASVVPQERQQVTSKHYPNYKVIVLNDDFNTFRHVAACLMKYIPNMTSDRAWELTNQVHYEGQAIVWVGPQVQAELYHEQLLRAGLTMAPLEPGGS

SEQ ID NO: 358 - protein, 95 aa, Thermosynechococcus elongatus
ASVVPQERQQVARKHYPNYKVIVLNDDFNTFQHVAACLMKYIPNMTSDRAWELTNQVHYGGRAIVWVGPQEQAELYHEQLLRAGLTMAPLEPEGS

SEQ ID NO: 359 - protein, 95 aa, Thermosynechococcus elongatus
ASVVPQERQQVARKHYPNYKVIVLNDDFNTFQHVAACLMKYIPNMTSDRAWELTNQVHYVGQAIVWVGPQEQAELYHEQLLRAGLTMAPLEPGGS

SEQ ID NO: 360 - protein, 95 aa, Thermosynechococcus elongatus; identical to SEQ ID NO: 61

SEQ ID NO: 361 - protein, 95 aa, Thermosynechococcus elongatus; identical to SEQ ID NO: 1

SEQ ID NO: 362 - protein, 95 aa, Thermosynechococcus elongatus
ASVVPQEGQQVTRKHYPNYKVIVLNDDFNTFKHVVACLKKYIPNMISDRAWELTNQVHYGGRAIVWVGPQEQAELYHEQLLRAGLTMAPLEPEGS

SEQ ID NO: 363 - protein, 95 aa, Thermosynechococcus elongatus
ASVVPQEGQQVTRKHYPNYKVIVLNDDFNTFQHVVTCLKKYIPNMISDRAWELTNQVHYGGRAIVWVGPQEQAELYHEQLLRAGLTMAPLEPEGS

SEQ ID NO: 364 - protein, 95 aa, Thermosynechococcus elongatus; identical to SEQ ID NO: 43

SEQ ID NO: 365 - protein, 95 aa, Thermosynechococcus elongatus
ASVVPQEGQQVTRKHYPNYKVIVLNDDFNTFQHVVACLKKYIPNMISDRAWELTNQVHYEGQAIVWVGPQEQAELYHEQLLRTGLTMAPLEPEGS

SEQ ID NO: 366 - protein, 95 aa, Thermosynechococcus elongatus; identical to SEQ ID NO: 148

SEQ ID NO: 367 - protein, 95 aa, Thermosynechococcus elongatus; identical to SEQ ID NO: 1

SEQ ID NO: 368 - protein, 95 aa, Thermosynechococcus elongatus; identical to SEQ ID NO: 81

SEQ ID NO: 369 - protein, 95 aa, Thermosynechococcus elongatus; identical to SEQ ID NO: 1

SEQ ID NO: 370 - protein, 95 aa, Thermosynechococcus elongatus
ASVVPQEGQQVTRKHYPNYKVIVLNDDFNTFQHVVACLKKYIPNMISDRAWELTNQVHYGGRAIVWVGTQEQAELYHEQLLRAGLTMAPLEPEGS

SEQ ID NO: 371 - protein, 95 aa, Thermosynechococcus elongatus
ASVVPQEGQQVTRKHYPNYKVIVLNDDFNTFQHVVACLKKYIPNMISDRAWELTNQVHYGGRAIVWVGPQEQAELYHEQLLRAGFTMAPLEPEGS

SEQ ID NO: 372 - protein, 95 aa, Thermosynechococcus elongatus
ASVVPQEGQQVTRKHYPNYKVIVLNDDFNTFQHVVACLKKYIPNMISDRAWELTNQVHYVGQAIVWVGPQEQAELYHEQLLRAGLTMAPLEPKGS

SEQ ID NO: 373 - protein, 59 aa, Thermosynechococcus elongatus
ASVVPQEGQQVTRKHYPNYKVIVLNDDFNTFQHVVACLKKYIPNMISDRAWELTNQVHY

SEQ ID NO: 374 - protein, 95 aa, Thermosynechococcus elongatus; identical to SEQ ID NO: 70

SEQ ID NO: 375 - protein, 95 aa, Thermosynechococcus elongatus
ASVVPQEGQQVTRKHYPNYKVIVLNDDFNTFQHFVACLKKYIPNMISDRAWELTNQVHYGGRAIVWVGPQEQAELYHEQLLRAGLTMAPLEPEGS

SEQ ID NO: 376 - protein, 95 aa, Thermosynechococcus elongatus; identical to SEQ ID NO: 151

SEQ ID NO: 377 - protein, 95 aa, Thermosynechococcus elongatus; identical to SEQ ID NO: 278

SEQ ID NO: 378 - protein, 95 aa, Thermosynechococcus elongatus; identical to SEQ ID NO: 20

SEQ ID NO: 379 - protein, 95 aa, Thermosynechococcus elongatus
ASVVPQEGQQVTRKHYPNYNVIVLNDDFNTFQHVVACLKKYIPNMISDRAWELTNQVHYGGRAIVWVGPQEQAELYHEQLLRAGLTMAPLEPEGS

SEQ ID NO: 380 - protein, 95 aa, Thermosynechococcus elongatus
ASVVPQEGQQVTRKLYPNYKVIVLNDDFNTFQHVVACLKKYIPNMISDRAWELTNQVHYGGRAIVWVGPQEQAELYHEQLLRAGLTMAPLEPEGS

SEQ ID NO: 381 - protein, 95 aa, Thermosynechococcus elongatus
ASVVPQEVQQVTRKHYPNYKVIVLNDDFNTFQHVVACLKKYIPNMISDRAWELTNQVHYGGRAIVWVGPQEQAELYHEQLLRAGLTMAPLEPEGS

SEQ ID NO: 382 - protein, 95 aa, Thermosynechococcus elongatus; identical to SEQ ID NO: 1

SEQ ID NO: 383 - protein, 95 aa, Thermosynechococcus elongatus
ASVVQQEGQQVTRKHYPNYKVIVLNDDFNTFQHVVACLKKYIPNMISDRAWELTNQVHYGGRAIVWVGPQEQAELYHEQLLRAGLTMAPLEPEGS

SEQ ID NO: 384 - protein, 95 aa, Thermosynechococcus elongatus; identical to SEQ ID NO: 3

SEQ ID NO: 385 - protein, 95 aa, Thermosynechococcus elongatus
ASVVPQERQQVARKHYPNYKVIVLNDDFNTFQHVVACLKKYIPNMISDRAWELTNQVHYGGRAIVWVGPQEQAELYHEQLLRAGLTMAPLEPGGS

SEQ ID NO: 386 - protein, 95 aa, Thermosynechococcus elongatus
ASVVPQERQQVARKHYPNYKVIVLNDDFNTFRHVAACLMKYNPNMTSDRAWELTNQVHYEGQAIVWVGPQEQAELYHEQLLRAGLTMAPLEPEGS

SEQ ID NO: 387 - protein, 95 aa, Thermosynechococcus elongatus
ASVVPQERQQVARKHYPNYKVIVLNDDFNTFRHVAACLMKYIPNMTSDRAWELTNQVHYEGQAIVWVGPQVQAELYPEQLLRAGLTMAPLEPGGS

SEQ ID NO: 388 - protein, 95 aa, Thermosynechococcus elongatus; identical to SEQ ID NO: 3

SEQ ID NO: 389 - protein, 95 aa, Thermosynechococcus elongatus
ASVVPQERQQVARKHYPNYKVIVLNDDFNTFRHVAACLMKYIPNMTSDRAWELTNQVHYEGQAIVWVCPQVQAELYHEQLLRAGLTMAPLEPGGS

SEQ ID NO: 390 - protein, 95 aa, Thermosynechococcus elongatus; identical to SEQ ID NO: 54

SEQ ID NO: 391 - protein, 95 aa, Thermosynechococcus elongatus
ASVVPQERQQDTRKHYPNYKVRVLNDDFNTFRHVAACLMKYIPNMTSDRAWELTNQVHYEGQAIVWVGPQEQAELYHEQLLRAGLTMAPLEPEGS

SEQ ID NO: 392 - protein, 95 aa, Thermosynechococcus elongatus
ASVVPQERQQDTRKHYPNYKVIILNDDFNTFQHVAACLMKYIPNMTSDRAWELTNQVHYEGQAIVRVGPQEQAELYHEQLLRAGLTMAPLEPGGS

SEQ ID NO: 393 - protein, 95 aa, Thermosynechococcus elongatus
ASVVPQERQQDTRKHYPNYKVIVLNDDFNTFQHVVACLKKYIPNMTSDRAWELTNQVHYEGQAIVWVGPQEQAELYHEQLLRAGLTMAPLEPEGS

SEQ ID NO: 394 - protein, 95 aa, Thermosynechococcus elongatus
ASVVPQERQQDTRKHYPNYKVIVLNDDFNTFQHVVACLKKYIPNMISDRAWELTNQVHYKGQAIVWVGPQEQAELNHEQLLRAGLTMAPLEPEGS

SEQ ID NO: 395 - protein, 95 aa, Thermosynechococcus elongatus
ASVVPQERQQDTRKHYPNYKVIVLNDDFNTFRHDAACLMKYIPNMTSDRAWELTNQVHYEGQAIVWVGPQEQAELYHEQLLRAGLTMAPLEPEGS

SEQ ID NO: 396 - protein, 95 aa, Thermosynechococcus elongatus
ASVVPQERQQDTRKHYPNYKVIVLNDDFNTFRHVATCLMKYIPNMTSDRAWELTNQVHYEGQAIVWVGPQEQAELYHEQLLRAGLTMAPLEPEGS

SEQ ID NO: 397 - protein, 95 aa, Thermosynechococcus elongatus
ASVVPQERQQDTRKHYPNYKVIVLNDDFNTFRHVAACLMKYNPNMTSDRAWELTNQVHYEGQAIVWVGPQEQAELYHEQLLRAGLTMAPLEPEGS

SEQ ID NO: 398 - protein, 95 aa, Thermosynechococcus elongatus
ASVVPQERQQDTRKHYPNYKVIVLNDDFNTFRHVAACLMKYIPNKTSDRAWELTNQVHYEGQAIVRVGPQEQAELYHKQLLRAGLTMAPLEPEGS

SEQ ID NO: 399 - protein, 95 aa, Thermosynechococcus elongatus
ASVVPQERQQDTRKHYPNYKVIVLNDDFNTFRHVAACLMKYIPNKTSDRAWELTNQVHYEGQAIVWVGPQEQAELYHEQLLRAGLTMATLEPEGS

SEQ ID NO: 400 - protein, 95 aa, Thermosynechococcus elongatus; identical to SEQ ID NO: 213

SEQ ID NO: 401 - protein, 95 aa, Thermosynechococcus elongatus
ASVVPQERQQDTRKHYPNYKVIVLNDDFNTFRHVAACLMKYIPNMTSDRAWELTNQVHYEGQAIVWVGTQEQAELYHEQLLRAGLTMAPLEPEGS

SEQ ID NO: 402 - protein, 95 aa, Thermosynechococcus elongatus
ASVVPQERQQDTRKHYPNYKVIVLNDDFNTFRHVAACLMKYIPNMTSDRAWELTNQVHYEGQAIVWVGPQEQAELYHEQWLRAGLTMAPLEPEGS

SEQ ID NO: 403 - protein, 95 aa, Thermosynechococcus elongatus
ASVVPQERQQDTRKHYPNYKVIVLNDDFNTFRHVAACLMKYIPNMTSDRAWELTNQVHYEGQAIVWVGPQEQAELYHEQLWRAGLTMAPLEPEGS

SEQ ID NO: 404 - protein, 95 aa, Thermosynechococcus elongatus
ASVVPQERQQDTRKHYPNYKVIVLNDDFNTFRHVAACLMKYIPNMTSDRAWELTNQVHYEGQAIVWVGPQEQAELYHEQLLRAGFTMAPLEPEGS

SEQ ID NO: 405 - protein, 95 aa, Thermosynechococcus elongatus
ASVVPQERQQDTRKHYPNYKVIVLNDDFNTFRHVAACLMKYIPNMTSDRAWELTNQVHYEGQAIVWVGPQEQAELYHEQLLRVGLTMAPLEPEGS

SEQ ID NO: 406 - protein, 95 aa, Thermosynechococcus elongatus
ASVVPQERQQDTRKHYPNYKVIVLNDDFNTFRHVAACLMKYIPNMTSDRAWELTNQVHYEGQAIVWVGPQERAELYHEQLLRAGLTMAPLEPEGS

SEQ ID NO: 407 - protein, 95 aa, Thermosynechococcus elongatus
ASVVPQERQQDTRKHYPNYKVIVLNDDFNTFRHVAACLMKYIPNMTSDRAWELTNQVHYEGQAIVWVCPQEQAELYHEQLLRAGLTMAPLEPEGS

SEQ ID NO: 408 - protein, 95 aa, Thermosynechococcus elongatus
ASVVPQERQQDTRKHYPNYKVIVLNDDFNTFRHVAACLMKYIPNMTSDRAWELTNQVHYGGRAIVWVGPQEQAELYHEQLLRAGLTMAPLEPGGS

SEQ ID NO: 409 - protein, 51 aa, Thermosynechococcus elongatus
ASVVPQERQQDTRKHYPNYKVIVLNDDFNTFRHVAACLMKYIPNMTSDRAW

SEQ ID NO: 410 - protein, 95 aa, Thermosynechococcus elongatus
ASVVPQERQQDTRKHYPNYKVIVLNDDFNTFRHVAACLMKYIPNMTSYRAWELTNQVHYEGQAIVWVGPQEQAELYHEQLLRAGLTMAPLEPEGS

SEQ ID NO: 411 - protein, 95 aa, Thermosynechococcus elongatus
ASVVPQERQQDTRKHYPNYKVIVLNDDFNTFRHFAACLMKYIPNMTSDRAWELTNQVHYEGQAIVWVGPQEQAELYHEQLLRAGLTMAPLEPEGS

SEQ ID NO: 412 - protein, 95 aa, Thermosynechococcus elongatus
ASVVPQERQQDTRKHYPNYKVIVLNYDFNTFRHVAACLMKYIPNMTSDRAWELTNQVHYEGQAIVWVGPQEQAELYHEQLLRAGLTMAPLEPEGS

SEQ ID NO: 413 - protein, 95 aa, Thermosynechococcus elongatus
ASVVPQERQQVTRKHYPNYKVIVLNDDFNTFRHVAACLMKYIPNKTSDRAWELTNQVHYEGQAIVWVGPQVQAELYHEQLLRAGLTMAPLEPGGS

SEQ ID NO: 414 - protein, 95 aa, Thermosynechococcus elongatus; identical to SEQ ID NO: 5

SEQ ID NO: 415 - protein, 95 aa, Thermosynechococcus elongatus
ASVVPQERQQVTRKHHPNYKVIVLNDDFNTFRHVAACLKKYIPNMISDRAWELTNQVHYGGRAIVWVGPQEQAELYHEQLLRAGLTMAPLEPEGS

SEQ ID NO: 416 - protein, 95 aa, Thermosynechococcus elongatus
ASVVPQERQQVTRKHHPNYKVIVLNDDFNTFRHVAACLMKYIPNMTSDRAWELTNQVHYEGQAIVWVGPQEQAELNHEQLLRAGLTMAPLEPEGS

SEQ ID NO: 417 - protein, 95 aa, Thermosynechococcus elongatus
ASVVPQERQQVTRKHYPNYKVIVLNDDFNTFQHVVACLKKYIPNMTSDRAWELTNQVHYEGQAIVWVGPQEQAELYHEQLLRAGLTMAPLEPEGS

SEQ ID NO: 418 - protein, 95 aa, Thermosynechococcus elongatus; identical to SEQ ID NO: 250

SEQ ID NO: 419 - protein, 95 aa, Thermosynechococcus elongatus
ASVVPQERQQVTRKHYPNYKVIVLNDDFNTFRHVAACLMKYIPNMTSDRAWELTNQVHYEGQAIVRVGPQEQAELYHKQLLRAGLTMAPLEPEGS

SEQ ID NO: 420 - protein, 95 aa, Thermosynechococcus elongatus
ASVVPQERQQVTRKHYPNYKVIVLNDDFNTFRHVAACLMKYIPNMTSDRAWELTNQVHYEGRAIVWVGPQEQAELYHEQLLRAGLTMAPLEPEGS

SEQ ID NO: 421 - protein, 95 aa, Thermosynechococcus elongatus
ASVVPQERQQVTRKHYPNYKVIVLNDDFNTFRHVAACLMKYIPNMTSDRAWELTNQVHYKGKAIVWVGPQEQAELNHEQLLRAGLTMAPLEPEGS

SEQ ID NO: 422 - protein, 95 aa, Thermosynechococcus elongatus; identical to SEQ ID NO: 6

SEQ ID NO: 423 - protein, 95 aa, Thermosynechococcus elongatus
ASVVPQEGQQVTRKHYPNYKVIVLNDDFNTFQHGVACLKKYIPNMISDRAWELTNQVHYGGRAIVWVGPQEQAELYHEQLLRAGLTMAPLEPEGS

SEQ ID NO: 424 - protein, 95 aa, Thermosynechococcus elongatus
ASVVPQEGQQVTRKHYPNYKVIVLNDDFNTFQHVVACLKKYIPNMISDRAWELTNQGHYGGRAIVWVGPQEQAELYHEQLLRAGLTMAPLEPEGS

SEQ ID NO: 425 - protein, 95 aa, Thermosynechococcus elongatus
ASVVPQEGQQVTRKHYPNYKVIVLNDDFNTFQHVVACLKKYIPNMISDRAWELTNQVHYEGQAIVRVGPQEQAELYHKQLLRAGLTMAPLEPEGS

SEQ ID NO: 426 - protein, 95 aa, Thermosynechococcus elongatus
ASVVPQEGQQVTRKHYPNYKVIVLNDDFNTFQHVVACLKKYIPNMISDRAWELTNQVHYGGQAIVWVGPQEQAELNHEQLLRAGLTMAPLEPEGS

SEQ ID NO: 427 - protein, 95 aa, Thermosynechococcus elongatus
ASVVPQEGQQVTRKHYPNYKVIVLNDDFNTFQHVVACLKKYIPNMISDRAWELTNQVHYGGRAIVWVGPQEQAELNHEQLLRAGLTMAPLEPGGS

SEQ ID NO: 428 - protein, 90 aa, Thermosynechococcus elongatus
ASVVPQEGQQVTRKHYPNYKVIVLNDDFNTFQHVVACLKKYIPNMISDRAWELTNQVHYGGRAIVWVGPQEQAELYHEQLLRAGLTMAPL

SEQ ID NO: 429 - protein, 95 aa, Thermosynechococcus elongatus
ASVVPQEGQQVTRKHYPNYKVIVLNDDFNTFQHVVACLKKYIPNMISDRAWELTNQVHYGGRAIVWVGPQEQAELYHEQLLIAGLTMAPLEPEGS

SEQ ID NO: 430 - protein, 95 aa, Thermosynechococcus elongatus
ASVVPQEGQQVTRKHYPNYKVIVLNDDFNTFQHVVACLKKYIPNMISDRAWELTNQVHYGGRAIVWVGPQEQAELYPEQLLRAGLTMAPLEPEGS

SEQ ID NO: 431 - protein, 73 aa, Thermosynechococcus elongatus
ASVVPQEGQQVTRKHYPNYKVIVLNDDFNTFQHVVACLKKYIPNMISDRAWELTNQVHYGGRAIVWVGPQEQA

SEQ ID NO: 432 - protein, 95 aa, Thermosynechococcus elongatus
ASVVPQEGQQVTRKHYPNYKVIVLNDDFNTFQHVVACLKKYIPNMISDRAWELTNQVHYGGLAIVWVGPQEQAELYHEQLLRAGLTMAPLEPEGS

SEQ ID NO: 433 - protein, 95 aa, Thermosynechococcus elongatus
ASVVPQEGQQVTRKHYPNYKVIVLNDDFNTFQHVVACLKKYIPNMISDRSWELTNQVHYGGRAIVWVGPQEQAELYHEQLLRAGLTMAPLEPEGS

SEQ ID NO: 434 - protein, 95 aa, Thermosynechococcus elongatus
ASVVPQEGQQVTRKHYPNYKVIVLNDDFNTFQHVVVCLKKYIPNMISDRAWELTNQVHYGGRAIVWVGPQEQAELYHEQLLRAGLTMAPLEPEGS

SEQ ID NO: 435 - protein, 95 aa, Thermosynechococcus elongatus
ASVVPQEGQQVTRKHYPNYKVIVLNDDFNTFRHVAACLMKYNPNMTSDRAWELTNQVHYEGQAIVWVGPQEQAELYHEQLLRAGLTMAPLEPEGS

SEQ ID NO: 436 - protein, 95 aa, Thermosynechococcus elongatus
ASVVPQEGQQVTRKHYPNYKVIVLNDDFNTFRHVAACLMKYIPNKTSDRAWELTNQVHYKGQAIVWVGPQEQAELNHEQLLRAGLTMAPLEPEGS

SEQ ID NO: 437 - protein, 95 aa, Thermosynechococcus elongatus
ASVVPQEGQQVTRKHYPNYKVIVLNDDFNTFRHVAACLMKYIPNMTSDRAWELTNQVHYEGQAIVWVGPQEQAELNHEQLLRAGLTMAPLEPEGS

SEQ ID NO: 438 - protein, 95 aa, Thermosynechococcus elongatus
ASVVPQEGQQVTRKHYPNYKVIVLNDDFITFQHVVACLKKYIPNMISDRAWELTNQVHYGGRAIVWVGPQEQAELYHEQLLRAGLTMAPLEPEGS

SEQ ID NO: 439 - protein, 95 aa, Thermosynechococcus elongatus
ASVVPQEGQHVTRKHYPNYKVIVLNDDFNTFQHVVACLKKYIPNMISDRAWELTNQVHYGGRAIVWVGPQEQAELYHEQLLRAGLTMAPLEPEGS

SEQ ID NO: 440 - protein, 95 aa, Thermosynechococcus elongatus
ASVVPQVGQQVTRKHYPNYKVIVLNDDFNTFQHVVACLKKYIPNMISDRAWELTNQVHYGGRAIVWVGPQEQAELYHEQLLRAGLTMAPLEPEGS

SEQ ID NO: 441 - protein, 6 aa, Thermosynechococcus elongatus
ASVVPQ

SEQ ID NO: 442 - protein, 95 aa, Thermosynechococcus elongatus
ARVVPQEGQQVTRKHYPNYKVIVLNDDFNTFQHVVACLKKYIPNMISDRAWELTNQVHYGGRAIVWVGPQEQAELYHEQLLRAGLTMAPLEPEGS

SEQ ID NO: 443 - protein, 95 aa, Thermosynechococcus elongatus
ASVVQQERQQDTRKHYPNYKVIVLNDDFNTFRHVAACLMKYIPNMTSDRAWELTNQVHYEGQAIVWVGPQEQAELYHEQLLRAGLTMAPLEPEGS

SEQ ID NO: 444 - protein, 95 aa, Thermosynechococcus elongatus; identical to SEQ ID NO: 4

SEQ ID NO: 445 - protein, 95 aa, Thermosynechococcus elongatus
ASVVPQERQQVARKHYPNYKVIVLNDDFNTIRHVAACLMKYIPNMTSDRAWELTNQVHYEGQAIVWVGPQVQAELYHEQLLRAGLTMAPLEPGGS

SEQ ID NO: 446 - protein, 95 aa, Thermosynechococcus elongatus
ASVVPQERQQVARKHYPNYKVIVLNDDFNTFQHVAACLMKYIPNKTSDRAWELTNQVHYEGQAIVWVGPQEQAELYHEQLLRAGLTMAPLEPEGS

SEQ ID NO: 447 - protein, 95 aa, Thermosynechococcus elongatus
ASVVPQERQQVARKHYPNYKVIVLNDDFNTFQHVAACLMKYIPNMTSDRAWELTNQVHYEGQAIVRVGPQEQAELYHKQLLRAGLTMAPLEPEGS

SEQ ID NO: 448 - protein, 95 aa, Thermosynechococcus elongatus; identical to SEQ ID NO: 222

SEQ ID NO: 449 - protein, 95 aa, Thermosynechococcus elongatus
ASVVPQERQQVARKHYPNYKVIVLNDDFNTFRHVAACLMKYIPNMTSDRAWELTNQVHYKGQAIVWVGPQEQAELNHEQLLRAGLTMAPLEPGGS

SEQ ID NO: 450 - protein, 95 aa, Thermosynechococcus elongatus
ASVVPQERQQVARKHYPNYKVIVLNDDFNTFRHVAACLMKYIPNMTSDRAWELTNQVHYEGQAIVWVGTQVQAELYHEQLLRAGLTMAPLEPGGS

SEQ ID NO: 451 - protein, 95 aa, Thermosynechococcus elongatus
ASVVPQERQQVARKHYPNYKVIVLNDDFNTFRHVAACLMKYIPNMTSDRAWELTNQVHYEGQAIVWVGPQEQAELYHEQLLRAGLTMAPLEPKGS

SEQ ID NO: 452 - protein, 95 aa, Thermosynechococcus elongatus
ASVVPQERQQVARKHYPNYKVIVLNDDFNTFRHVAACLMKYIPNMTSDRAWELTNQVHYEGQAIVWVGPQVQAELYHEQVLRAGLTMAPLEPGGS

SEQ ID NO: 453 - protein, 95 aa, Thermosynechococcus elongatus; identical to SEQ ID NO: 9

SEQ ID NO: 454 - protein, 95 aa, Thermosynechococcus elongatus
ASVVPQERQQVARKHYPNYKVIVLNDDFNTFRHVAACLMKYIPNMTSDRAWELTNQVHYEGQAIVLVGPQVQAELYHEQLLRAGLTMAPLEPGGS

SEQ ID NO: 455 - protein, 95 aa, Thermosynechococcus elongatus
ASVVPQERQQVARKHYPNYKVIVLNDDFNTFRHVAACLMKYIPNMTSDRAWELTNQVHYECQAIVWVGPQVQAELYHEQLLRAGLTMAPLEPGGS

SEQ ID NO: 456 - protein, 95 aa, Thermosynechococcus elongatus
ASVVPQERQQVARKHYPNYKVIVLNDDFNTFRHVAACLMKYIPNMTSDRAWELTNQVHYGGRAIVWVGPQEQAELNHEQLLRAGLTMAPLEPEGS

SEQ ID NO: 457 - protein, 95 aa, Thermosynechococcus elongatus
ASVVPQERQQVARKHYPNYKVIVLNDDFNTFRHVAACLMKYIPNMTSDRAWELTNQVHYVGQAIVWVGPQERAELYHEQLLRAGLTMAPLEPEGS

SEQ ID NO: 458 - protein, 95 aa, Thermosynechococcus elongatus
ASVVPQERQQVARKHYPNYKVIVLNDDFNTFRHVAACLMKYIPNITSDRAWELTNQVHYEGQAIVWVGPQVQAELYHEQLLRAGLTMAPLEPGGS

SEQ ID NO: 459 - protein, 95 aa, Thermosynechococcus elongatus
ASVVPQERQQDTRKHYPNYKVIVLNDDFNTIRHVAACLMKYIPNKTSDRAWELTNQVHYEGQAIVWVGPQEQAELYHEQLLRAGLTMAPLEPEGS

SEQ ID NO: 460 - protein, 95 aa, Thermosynechococcus elongatus
ASVVPQERQQDTRKHYPNYKVIVLNDDFNTFQHVAACLMKYIPNMTSDRAWELTNQVHYEGQAIVWVGPQVQAELYHEQLLRAGLTMAPLEPGGS

SEQ ID NO: 461 - protein, 95 aa, Thermosynechococcus elongatus
ASVVPQERQQDTRKHYPNYKVIVLNDDFNTFQHVVACLKKYIPNMISDRAWELTNQVHYGGQAIVWVGPQEQAELYHEQLLRAGLTMAPLEPEGS

SEQ ID NO: 462 - protein, 40 aa, Thermosynechococcus elongatus
ASVVPQERQQDTRKHYPNYKVIVLNDDFNTFRHVAACLMK

SEQ ID NO: 463 - protein, 95 aa, Thermosynechococcus elongatus
ASVVPQERQQDTRKHYPNYKVIVLNDDFNTFRHVAACLMKYITNMTSDRAWELTNQVHYEGQAIVWVGPQEQAELYHEQLLRAGLTMAPLEPEGS

SEQ ID NO: 464 - protein, 95 aa, Thermosynechococcus elongatus; identical to SEQ ID NO: 4

SEQ ID NO: 465 - protein, 95 aa, Thermosynechococcus elongatus
ASVVPQERQQDTRKHYPNYKVIVLNDDFNTFRHVAACLMKYIPNKTSDRAWELTNQVHYEGQAIVWVGPQEQAELYHKQLLRAGLTMAPLEPEGS

SEQ ID NO: 466 - protein, 95 aa, Thermosynechococcus elongatus
ASVVPQERQQDTRKHYPNYKVIVLNDDFNTFRHVAACLMKYIPNKTSDRAWELTNQVHYEGQAIVWVGPQEQAELYHEQVLRAGLTMAPLEPEGS

SEQ ID NO: 467 - protein, 95 aa, Thermosynechococcus elongatus
ASVVPQERQQDTRKHYPNYKVIVLNDDFNTFRHVAACLMKYIPNKTSDRAWELTNQVHYEGQAIVWVGPQEQAELYHEQLLRACLTMAPLEPEGS

SEQ ID NO: 468 - protein, 95 aa, Thermosynechococcus elongatus
ASVVPQERQQDTRKHYPNYKVIVLNDDFNTFRHVAACLMKYIPNKTSDRAWELTNQVHYEGQAIVWVGPQEQAELYHEQLLRVGLTMAPLEPEGS

SEQ ID NO: 469 - protein, 77 aa, Thermosynechococcus elongatus
ASVVPQERQQDTRKHYPNYKVIVLNDDFNTFRHVAACLMKYIPNKTSDRAWELTNQVHYEGQAIVWVGPQEQAELYH

SEQ ID NO: 470 - protein, 95 aa, Thermosynechococcus elongatus
ASVVPQERQQDTRKHYPNYKVIVLNDDFNTFRHVAACLMKYIPNKTSDRAWELTNQVHYEGQAIVLVGPQEQAELYHEQLLRAGLTMAPLEPEGS

SEQ ID NO: 471 - protein, 95 aa, Thermosynechococcus elongatus; identical to SEQ ID NO: 146

SEQ ID NO: 472 - protein, 95 aa, Thermosynechococcus elongatus
ASVVPQERQQDTRKHYPNYKVIVLNDDFNTFRHVAACLMKYIPNMTSDRAWELTNQVHYEGQAIVWVGPQEQAELYHEQLLRAGLTMAQLEPEGS

SEQ ID NO: 473 - protein, 95 aa, Thermosynechococcus elongatus; identical to SEQ ID NO: 16

SEQ ID NO: 474 - protein, 95 aa, Thermosynechococcus elongatus
ASVVPQERQQDTRKHYPNYKVIVLNDDFNTFRHVAACLMKYIPNMTSDRAWELTNQVHYEGQAIVWVGPQEQAELYHEQLLRAGLTMAPSEPEGS

SEQ ID NO: 475 - protein, 93 aa, Thermosynechococcus elongatus
ASVVPQERQQDTRKHYPNYKVIVLNDDFNTFRHVAACLMKYIPNMTSDRAWELTNQVHYEGQAIVWVGPQEQAELYHEQLLRAGLTMAPLEPE

SEQ ID NO: 476 - protein, 90 aa, Thermosynechococcus elongatus
ASVVPQERQQDTRKHYPNYKVIVLNDDFNTFRHVAACLMKYIPNMTSDRAWELTNQVHYEGQAIVWVGPQEQAELYHEQLLRAGLTMAPL

SEQ ID NO: 477 - protein, 95 aa, Thermosynechococcus elongatus
ASVVPQERQQDTRKHYPNYKVIVLNDDFNTFRHVAACLMKYIPNMTSDRAWELTNQVHYEGQAIVWVGPQEQAELYHEQLLIAGLTMAPLEPEGS

SEQ ID NO: 478 - protein, 95 aa, Thermosynechococcus elongatus
ASVVPQERQQDTRKHYPNYKVIVLNDDFNTFRHVAACLMKYIPNMTSDRAWELTNQVHYEGQAIVWVGPQEQAELYHELLLRAGLTMAPLEPEGS

SEQ ID NO: 479 - protein, 95 aa, Thermosynechococcus elongatus; identical to SEQ ID NO: 2

SEQ ID NO: 480 - protein, 70 aa, Thermosynechococcus elongatus
ASVVPQERQQDTRKHYPNYKVIVLNDDFNTFRHVAACLMKYIPNMTSDRAWELTNQVHYEGQAIVWVGPQ

SEQ ID NO: 481 - protein, 95 aa, Thermosynechococcus elongatus
ASVVPQERQQDTRKHYPNYKVIVLNDDFNTFRHVAACLMKYIPNMTSDRAWELTNQVHYVGQAIVWVGPQEQAELYHEQLLRAGLTMAPLEPEGS

SEQ ID NO: 482 - protein, 95 aa, Thermosynechococcus elongatus
ASVVPQERQQDTRKHYPNYKVIVLNDDFNTFRHVAACLMKYIPNMTSDRAWELTNHVHYEGQAIVWVGPQEQAELYHEQLLRAGLTMAPLEPEGS

SEQ ID NO: 483 - protein, 95 aa, Thermosynechococcus elongatus
ASVVPQERQQDTRKHYPNYKVIVLNDDFNTFRHVAACLMKYIPNMTSDRAWDLTNQVHYEGQAIVWVGPQEQAELYHEQLLRAGLTMAPLEPEGS

SEQ ID NO: 484 - protein, 95 aa, Thermosynechococcus elongatus
ASVVPQERQQDTRKHYPNYKVIVLNDDFNTFRHVAAFLMKYIPNMTSDRAWELTNQVHYEGQAIVWVGPQEQAELYHEQLLRAGLTMAPLEPEGS

SEQ ID NO: 485 - protein, 95 aa, Thermosynechococcus elongatus; identical to SEQ ID NO: 2

SEQ ID NO: 486 - protein, 95 aa, Thermosynechococcus elongatus
ASVVPQERQQVTRKHYPNYKVIVLNDDFNTFQHVAACLMKYIPNMTSDRAWELTNQVHYEGQAIVWVGPQEQAELYHEQLLRAGLTMAPLEPEGS

SEQ ID NO: 487 - protein, 95 aa, Thermosynechococcus elongatus; identical to SEQ ID NO: 413

SEQ ID NO: 488 - protein, 95 aa, Thermosynechococcus elongatus; identical to SEQ ID NO: 29

SEQ ID NO: 489 - protein, 95 aa, Thermosynechococcus elongatus
ASVVPQERQQVTRKHYPNYKVIVLNDDFNTFRHVAACLMKYIPNMTSDRAWELTNQVHYKGQAIVWVGPQEQAELNHEQLLRAGLTRAPLEPEGS

SEQ ID NO: 490 - protein, 95 aa, Thermosynechococcus elongatus; identical to SEQ ID NO: 162

SEQ ID NO: 491 - protein, 95 aa, Thermosynechococcus elongatus
ASVVPQERQQVTRKHYPNYKVIVLNDYFNTFRHVAACLMKYIPNMTSDRAWELTNQVHYKGQAIVWVGPQEQAELNHEQLLRAGLTMAPLEPEGS

SEQ ID NO: 492 - protein, 95 aa, Thermosynechococcus elongatus
ASVVPQERQQVARKHYPNYKVIVLNDDFNTFQHVAACLMKYIPNMTSDRAWELTNQVHYEGQAIVWVGPQVQAELYHEQLLRAGLTMAPLEPGGS

SEQ ID NO: 493 - protein, 95 aa, Thermosynechococcus elongatus; identical to SEQ ID NO: 9

SEQ ID NO: 494 - protein, 95 aa, Thermosynechococcus elongatus
ASVVPQEIQQDTRKHYPNYKVIVLNDDFNTFRHVAACLMKYIPNMTSDRAWELTNQVHYEGQAIVWVGPQEQAELYHEQLLRAGLTMAPLEPEGS

SEQ ID NO: 495 - protein, 95 aa, Thermosynechococcus elongatus
ASVVPQEGQQVARKHYPNYKVIVLNDDFNTFRHVAACLMKYIPNMTSDRAWELTNQVHYEGQAIVWVGPQEQAELYHEQLLRAGLTMAPLEPEGS

SEQ ID NO: 496 - protein, 95 aa, Thermosynechococcus elongatus
ASVVPQEGQQVTRKHYPNYKDIVLNDDFNTFQHVVACLKKYIPNMISDRAWELTNQVHYGGRAIVWVGPQEQAELYHEQLLRAGLTMAPLEPEGS

SEQ ID NO: 497 - protein, 95 aa, Thermosynechococcus elongatus
ASVVPQEGQQVTRKHYPNYKVIVLNDDFNTIQHVVACLKKYIPNMISDRAWELTNQVHYGGRAIVWVGPQEQAELYHEQLLRAGLTMAPLEPEGS

SEQ ID NO: 498 - protein, 95 aa, Thermosynechococcus elongatus
ASVVPQEGQQVTRKHYPNYKVIVLNDDFNTFQHVAACLKKYIPNMISDRAWELTNQVHYGGRAIVWVGPQEQAELYHEQLLRAGLTMAPLEPEGS

SEQ ID NO: 499 - protein, 95 aa, Thermosynechococcus elongatus; identical to SEQ ID NO: 75

SEQ ID NO: 500 - protein, 95 aa, Thermosynechococcus elongatus
ASVVPQEGQQVTRKHYPNYKVIVLNDDFNTFQHVVACLKKYIPNMTSDRAWELTNQVHYEGQAIVRVGPQEQAELYHKQLLRAGLTMAPLEPEGS

SEQ ID NO: 501 - protein, 95 aa, Thermosynechococcus elongatus
ASVVPQEGQQVTRKHYPNYKVIVLNDDFNTFQHVVACLKKYIPNMTSDRAWELTNQVHYEGQAIVWVGPQVQAELYHEQLLRAGLTMAPLEPEGS

SEQ ID NO: 502 - protein, 95 aa, Thermosynechococcus elongatus
ASVVPQEGQQVTRKHYPNYKVIVLNDDFNTFQHVVACLKKYIPNMISDRAWELTNQVHYEGQAIVWVGPQEQAELNHEQLLRAGLTMAPLEPEGS

SEQ ID NO: 503 - protein, 95 aa, Thermosynechococcus elongatus; identical to SEQ ID NO: 502

SEQ ID NO: 504 - protein, 95 aa, Thermosynechococcus elongatus
ASVVPQEGQQVTRKHYPNYKVIVLNDDFNTFQHVVACLKKYIPNMISDRAWELTNQVHYGGRDIVWVGPQEQAELYHEQLLRAGLTMAPLEPEGS

SEQ ID NO: 505 - protein, 95 aa, Thermosynechococcus elongatus; identical to SEQ ID NO: 49

SEQ ID NO: 506 - protein, 95 aa, Thermosynechococcus elongatus
ASVVPQEGQQVTRKHYPNYKVIVLNDDFNTFQHVVACLKKYIPNMISDRAWELTNQVHYGGRAIVWVGPQEQAELYNEQLLRAGLTMAPLEPEGS

SEQ ID NO: 507 - protein, 95 aa, Thermosynechococcus elongatus; identical to SEQ ID NO: 1

SEQ ID NO: 508 - protein, 70 aa, Thermosynechococcus elongatus
ASVVPQEGQQVTRKHYPNYKVIVLNDDFNTFQHVVACLKKYIPNMISDRAWELTNQVHYGGRAIVWVGPQ

SEQ ID NO: 509 - protein, 95 aa, Thermosynechococcus elongatus
ASVVPQEGQQVTRKHYPNYKVIVLNDDFNTFQHVVACLKKYIPNMISDRAWELTNQVHYVGQAIVWVGPQERAELYHEQLLRAGLTMAPLEPEGS

SEQ ID NO: 510 - protein, 95 aa, Thermosynechococcus elongatus
ASVVPQEGQQVTRKHYPNYKVIVLNDDFNTFQHVVSCLKKYIPNMISDRAWELTNQVHYGGRAIVWVGPQEQAELYHEQLLRAGLTMAPLEPEGS

SEQ ID NO: 511 - protein, 95 aa, Thermosynechococcus elongatus
ASVVPQEGQQVTRKHYPNYKVIVLNDDFNTFRHVAACLMKYIPNMTSDRAWELTNQVHYEGQAIVRVGPQEQAELYHKQLLRAGLTMAPLEPEGS

SEQ ID NO: 512 - protein, 95 aa, Thermosynechococcus elongatus; identical to SEQ ID NO: 437

SEQ ID NO: 513 - protein, 95 aa, Thermosynechococcus elongatus
ASVVPQEGQQVTRKHYPNYKVIVLNDDFNTFRHVAACLMKYIPNMTSDRAWELTNQVHYKGQAIVWVGPQEQAELYHEQLLRAGLTMAPLEPGGS

SEQ ID NO: 514 - protein, 13 aa, Thermosynechococcus elongatus
ASVVPQEGQQVTR

SEQ ID NO: 515 - protein, 95 aa, Thermosynechococcus elongatus; identical to SEQ ID NO: 34

SEQ ID NO: 516 - protein, 95 aa, Thermosynechococcus elongatus
ASVVPQERQQVARKHYPNYKGIVLNDDFNTFRHVAACLMKYIPNMTSDRAWELTNQVHYEGQAIVWVGPQVQAELYHEQLLRAGLTMAPLEPGGS

SEQ ID NO: 517 - protein, 95 aa, Thermosynechococcus elongatus
ASVVPQERQQVARKHYPNYKVIVLNDDFNTFQHVVACLKKYIPNMISDRAWELTNQVHYGGRAIVWVGPQVQAELYHEQLLRAGLTMAPLEPGGS

SEQ ID NO: 518 - protein, 36 aa, Thermosynechococcus elongatus
ASVVPQERQQVARKHYPNYKVIVLNDDFNTFRHVAA

SEQ ID NO: 519 - protein, 95 aa, Thermosynechococcus elongatus
ASVVPQERQQVARKHYPNYKVIVLNDDFNTFRHVAACLMKYIPNKTSDRAWELTNQVHYKGQAIVWVGPQEQAELNHEQLLRAGLTMAPLEPEGS

SEQ ID NO: 520 - protein, 95 aa, Thermosynechococcus elongatus
ASVVPQERQQVARKHYPNYKVIVLNDDFNTFRHVAACLMKYIPNKTSDRAWELTNQVHYEGQAIVWVGPQEQAELNHEQLLRAGLTMAPLEPEGS

SEQ ID NO: 521 - protein, 95 aa, Thermosynechococcus elongatus; identical to SEQ ID NO: 3

SEQ ID NO: 522 - protein, 95 aa, Thermosynechococcus elongatus
ASVVPQERQQVARKHYPNYKVIVLNDDFNTFRHVAACLMKYIPNMTSDRAWELTNQVHYEGQAIVWVGPQVQDELYHEQLLRAGLTMAPLEPGGS

SEQ ID NO: 523 - protein, 95 aa, Thermosynechococcus elongatus
ASVVPQERQQVARKHYPNYKVIVLNDDFNTFRHVAACLMKYIPNMTSDRAWELTNQVHYEGQAIVWVGPQVQAELDHEQLLRAGLTMAPLEPGGS

SEQ ID NO: 524 - protein, 95 aa, Thermosynechococcus elongatus
ASVVPQERQQVARKHYPNYKVIVLNDDFNTFRHVAACLMKYIPNMTSDRAWELTNQVHYEGQAIVWVGPQVQAELYHEQLWRAGLTMAPLEPGGS

SEQ ID NO: 525 - protein, 95 aa, Thermosynechococcus elongatus
ASVVPQERQQVARKHYPNYKVIVLNDDFNTFRHVAACLMKYIPNMTSDRAWELTNQVHYEGQAIVWVGPQVQAELYHEQLLRTGLTMAPLEPEGS

SEQ ID NO: 526 - protein, 95 aa, Thermosynechococcus elongatus
ASVVPQERQQVARKHYPNYKVIVLNDDFNTFRHVAACLMKYIPNMTSDRAWELTNQVHYEGQAIVWVGPQVQAELYHEQLLRAGLTMAQLEPGGS

SEQ ID NO: 527 - protein, 95 aa, Thermosynechococcus elongatus
ASVVPQERQQVARKHYPNYKVIVLNDDFNTFRHVAACLMKYIPNMTSDRAWELTNQVHYEGQAIVWVGPQVQAELYHEQLLRAGLTMAPSEPGGS

SEQ ID NO: 528 - protein, 95 aa, Thermosynechococcus elongatus
ASVVPQERQQVARKHYPNYKVIVLNDDFNTFRHVAACLMKYIPNMTSDRAWELTNQVHYEGQAIVWVGPQVQAELYHEQLLRAGFTMAPLEPGGS

SEQ ID NO: 529 - protein, 95 aa, Thermosynechococcus elongatus; identical to SEQ ID NO: 3

SEQ ID NO: 530 - protein, 59 aa, Thermosynechococcus elongatus
ASVVPQERQQVARKHYPNYKVIVLNDDFNTFRHVAACLMKYIPNMTSDRAWELTNQVHY

SEQ ID NO: 531 - protein, 95 aa, Thermosynechococcus elongatus
ASVVPQERQQVARKHYPNYKVIVLNDDFNTFRHVAACLMKYIPNMTSDRAWELTNQVHFEGQAIVWVGPQVQAELYHEQLLRAGLTMAPLEPGGS

SEQ ID NO: 532 - protein, 95 aa, Thermosynechococcus elongatus
ASVVPQERQQVARKHYPNYKVIVLNDDFNTFRHVAACLMKYIPNMTSDRAWEFTNQVHYEGQAIVWVGPQVQAELYHEQLLRAGLTMAPLEPGGS

SEQ ID NO: 533 - protein, 95 aa, Thermosynechococcus elongatus
ASVVPQERQQVARKHYPNYKVIVLNDDFNTFRHVAACLMKYIPNMTSDIAWELTNQVHYEGQAIVWVGPQVQAELYHEQLLRAGLTMAPLEPGGS

SEQ ID NO: 534 - protein, 95 aa, Thermosynechococcus elongatus
ASVVPQERQQVARKHYPNYKVIVLNDDFNTFRHVAACLMKYIPNMTSYRAWELTNQVHYEGQAIVWVGPQVQAELYHEQLLRAGLTMAPLEPGGS

SEQ ID NO: 535 - protein, 95 aa, Thermosynechococcus elongatus; identical to SEQ ID NO: 449

SEQ ID NO: 536 - protein, 95 aa, Thermosynechococcus elongatus; identical to SEQ ID NO: 284

SEQ ID NO: 537 - protein, 95 aa, Thermosynechococcus elongatus
ASVVPQERQQVARKHYPNYKVIVLNDDFNTFRHVSACLMKYIPNMTSDRAWELTNQVHYEGQAIVWVGPQVQAELYHEQLLRAGLTMAPLEPGGS

SEQ ID NO: 538 - protein, 95 aa, Thermosynechococcus elongatus
ASVVPQERQQVARKHYPNYKVIVLNDDFNTFRHFAACLMKYIPNMTSDRAWELTNQVHYEGQAIVWVGPQVQAELYHEQLLRAGLTMAPLEPGGS

SEQ ID NO: 539 - protein, 95 aa, Thermosynechococcus elongatus
ASVVPQERQQVARKHYPNYKVIVLNDDFNTFLHVAACLMKYIPNMTSDRAWELTNQVHYEGQAIVWVGPQVQAELYHEQLLRAGLTMAPLEPGGS

SEQ ID NO: 540 - protein, 95 aa, Thermosynechococcus elongatus
ASVVPQERQQVARKHYPNYKVIVLYDDFNTFRHVAACLMKYIPNMTSDRAWELTNQVHYEGQAIVWVGPQVQAELYHEQLLRAGLTMAPLEPGGS

SEQ ID NO: 541 - protein, 95 aa, Thermosynechococcus elongatus
ASVVPQERQQDNRKHYPNYKVIVLNDDFNTFRHVAACLMKYIPNMTSDRAWELTNQVHYEGQAIVWVGPQEQAELYHEQLLRAGLTMAPLEPEGS

SEQ ID NO: 542 - protein, 95 aa, Thermosynechococcus elongatus; identical to SEQ ID NO: 102

SEQ ID NO: 543 - protein, 95 aa, Thermosynechococcus elongatus; identical to SEQ ID NO: 100

SEQ ID NO: 544 - protein, 95 aa, Thermosynechococcus elongatus
ASVVPQERQQDTRKHYPNYKDIVLNDDFNTFRHVAACLMKYIPNKTSDRAWELTNQVHYEGQAIVWVGPQEQAELYHEQLLRAGLTMAPLEPEGS

SEQ ID NO: 545 - protein, 95 aa, Thermosynechococcus elongatus
ASVVPQERQQDTRKHYPNYKDIVLNDDFNTFRHVAACLMKYIPNMTSDRAWELTNQVHYEGQAIVWVGPQEQAELYHEQLLRAGLTMAPLEPEGS

SEQ ID NO: 546 - protein, 95 aa, Thermosynechococcus elongatus
ASVVPQERQQDTRKHYPNYKGIVLNDDFNTFRHVAACLMKYIPNKTSDRAWELTNQVHYEGQAIVWVGPQEQAELYHEQLLRAGLTMAPLEPEGS

SEQ ID NO: 547 - protein, 95 aa, Thermosynechococcus elongatus
ASVVPQERQQDTRKHYPNYKVIILNDDFNTFQHVAACLMKYIPNMTSDRAWELTNQVHYKGQAIVWVGPQEQAELNHEQLLRAGLTMAPLEPEGS

SEQ ID NO: 548 - protein, 95 aa, Thermosynechococcus elongatus
ASVVPQERQQDTRKHYPNYKVIILNDDFNTFQHVAACLMKYIPNMTSDRAWELTNQVHYEGQAIVRVGPQEQAELYHKQLLRAGLTMAPLEPGGS

SEQ ID NO: 549 - protein, 95 aa, Thermosynechococcus elongatus; identical to SEQ ID NO: 547

SEQ ID NO: 550 - protein, 95 aa, Thermosynechococcus elongatus
ASVVPQERQQDTRKHYPNYKVIILNDDFNTFRHVAACLMKYIPNMTSDRAWELTNQVHYEGQAIVWVGPQVQAELYHEQLLRAGLTMAPLEPGGS

SEQ ID NO: 551 - protein, 95 aa, Thermosynechococcus elongatus
ASVVPQERQQDTRKHYPNYKVIILNDDFNTFRHVAACLMKYIPNMTSDRAWELTNQVHYKGQAIVWVGPQEQAELNHEQLLRAGLTMAPLEPEGS

SEQ ID NO: 552 - protein, 95 aa, Thermosynechococcus elongatus
ASVVPQERQQDTRKHYPNYKVIVLNDDFNTIRHVAACLMKYIPNMTSDRAWELTNQVHYEGQAIVWVGPQEQAELYHEQLLRAGLTMAPLEPEGS

SEQ ID NO: 553 - protein, 95 aa, Thermosynechococcus elongatus
ASVVPQERQQDTRKHYPNYKVIVLNDDFNTLRHVAACLMKYIPNMTSDRAWELTNQVHYEGQAIVWVGPQEQAELYHEQLLRAGLTMAPLEPEGS

SEQ ID NO: 554 - protein, 95 aa, Thermosynechococcus elongatus
ASVVPQERQQDTRKHYPNYKVIVLNDDFNTYRHVAACLMKYIPNMTSDRAWELTNQVHYEGQAIVWVGPQEQAELYHEQLLRAGLTMAPLEPEGS

SEQ ID NO: 555 - protein, 95 aa, Thermosynechococcus elongatus
ASVVPQERQQDTRKHYPNYKVIVLNDDFNTFQHVVACLMKYIPNMTSDRAWELTNQVHYEGQAIVWVGPQVQAELYHEQLLRAGLTMAPLEPGGS

SEQ ID NO: 556 - protein, 36 aa, Thermosynechococcus elongatus
ASVVPQERQQDTRKHYPNYKVIVLNDDFNTFRHVAA

SEQ ID NO: 557 - protein, 95 aa, Thermosynechococcus elongatus
ASVVPQERQQDTRKHYPNYKVIVLNDDFNTFRHVAACLMKYIPNKTSDRAWESTNQVHYEGQAIVWVGPQEQAELYHEQLLRAGLTMAPLEPEGS

SEQ ID NO: 558 - protein, 58 aa, Thermosynechococcus elongatus
ASVVPQERQQDTRKHYPNYKVIVLNDDFNTFRHVAACLMKYIPNKTSDRAWELTNQVH

SEQ ID NO: 559 - protein, 90 aa, Thermosynechococcus elongatus
ASVVPQERQQDTRKHYPNYKVIVLNDDFNTFRHVAACLMKYIPNKTSDRAWELTNQVHYEGQAIVWVGPQEQAELYHEQLLRAGLTMAPL

SEQ ID NO: 560 - protein, 95 aa, Thermosynechococcus elongatus
ASVVPQERQQDTRKHYPNYKVIVLNDDFNTFRHVAACLMKYIPNKTSDRAWELTNQVHYEGQAIVWVGPQEQAELYHEQLLRAGLTIAPLEPEGS

SEQ ID NO: 561 - protein, 95 aa, Thermosynechococcus elongatus
ASVVPQERQQDTRKHYPNYKVIVLNDDFNTFRHVAACLMKYIPNKTSDRAWELTNQVHYEGQAIVWVGPQERAELYHEQLLRAGLTMAPLEPEGS

SEQ ID NO: 562 - protein, 95 aa, Thermosynechococcus elongatus
ASVVPQERQQDTRKHYPNYKVIVLNDDFNTFRHVAACLMKYIPNKTSDRAWELTNQVHYEGQAIVWVGPREQAELYHEQLLRVGLTMAPLEPEGS

SEQ ID NO: 563 - protein, 95 aa, Thermosynechococcus elongatus
ASVVPQERQQDTRKHYPNYKVIVLNDDFNTFRHVAACLMKYIPNKTSDRAWELTNQVHYEGLAIVWVGPQEQAELYHEQLLRAGLTMAPLEPEGS

SEQ ID NO: 564 - protein, 95 aa, Thermosynechococcus elongatus
ASVVPQERQQDTRKHYPNYKVIVLNDDFNTFRHVAACLMKYIPNKTSDRAWELTNQVHYECQAIVWVGPQEQAELYHEQLLRAGLTMAPLEPEGS

SEQ ID NO: 565 - protein, 95 aa, Thermosynechococcus elongatus
ASVVPQERQQDTRKHYPNYKVIVLNDDFNTFRHVAACLMKYIPNKTSDRAWELTNQVHYVGQAIVWVGPQEQAELYHEQLLRAGLTMAPLEPKGS

SEQ ID NO: 566 - protein, 95 aa, Thermosynechococcus elongatus; identical to SEQ ID NO: 2

SEQ ID NO: 567 - protein, 95 aa, Thermosynechococcus elongatus
ASVVPQERQQDTRKHYPNYKVIVLNDDFNTFRHVAACLMKYIPNMTSDRAWELTNKVHYEGQAIVWVGPQEQAELYHEQLLRAGLTMAPLEPEGS

SEQ ID NO: 568 - protein, 95 aa, Thermosynechococcus elongatus
ASVVPQERQQDTRKHYPNYKVIVLNDDFNTFRHVAACLMKYIPNMTSDRAWELTNQGHYEGQAIVWVGPQEQAELYHEQLLRAGLTMAPLEPEGS

SEQ ID NO: 569 - protein, 58 aa, Thermosynechococcus elongatus
ASVVPQERQQDTRKHYPNYKVIVLNDDFNTFRHVAACLMKYIPNMTSDRAWELTNQVH

SEQ ID NO: 570 - protein, 95 aa, Thermosynechococcus elongatus; identical to SEQ ID NO: 146

SEQ ID NO: 571 - protein, 95 aa, Thermosynechococcus elongatus; identical to SEQ ID NO: 2

SEQ ID NO: 572 - protein, 95 aa, Thermosynechococcus elongatus
ASVVPQERQQDTRKHYPNYKVIVLNDDFNTFRHVAACLMKYIPNMTSDRAWELTNQVHYEGQAIVWVGPQEQAELYHEQFLRAGLTMAPLEPEGS

SEQ ID NO: 573 - protein, 95 aa, Thermosynechococcus elongatus
ASVVPQERQQDTRKHYPNYKVIVLNDDFNTFRHVAACLMKYIPNMTSDRAWELTNQVHYEGQAIVWVGPQEQAELYHEQLLRAGLTMTPLEPEGS

SEQ ID NO: 574 - protein, 92 aa, Thermosynechococcus elongatus
ASVVPQERQQDTRKHYPNYKVIVLNDDFNTFRHVAACLMKYIPNMTSDRAWELTNQVHYEGQAIVWVGPQEQAELYHEQLLRAGLTMAPLEP

SEQ ID NO: 575 - protein, 95 aa, Thermosynechococcus elongatus
ASVVPQERQQDTRKHYPNYKVIVLNDDFNTFRHVAACLMKYIPNMTSDRAWELTNQVHYEGQAIVWVGPQEQAELYHEQLLRACLTMAPLEPEGS

SEQ ID NO: 576 - protein, 95 aa, Thermosynechococcus elongatus
ASVVPQERQQDTRKHYPNYKVIVLNDDFNTFRHVAACLMKYIPNMTSDRAWELTNQVHYECQAIVWVGPQEQAELYHEQLLRAGLTMAPLEPEGS

SEQ ID NO: 577 - protein, 95 aa, Thermosynechococcus elongatus
ASVVPQERQQDTRKHYPNYKVIVLNDDFNTFRHVAACLMKYIPNMTSDRAWELTNQVHYVGQAIVWVGPQERAELYHEQLLRAGLTMAPLEPEGS

SEQ ID NO: 578 - protein, 95 aa, Thermosynechococcus elongatus
ASVVPQERQQDTRKHYPNYKVIVLNDDFNTFRHVAACLMKYIPNMTSDRAWELTNQVHCEGQAIVWVGPQEQAELYHEQLLRAGLTMAPLEPEGS

SEQ ID NO: 579 - protein, 95 aa, Thermosynechococcus elongatus
ASVVPQERQQDTRKHYPNYKVIVLNDDFNTFRHVAACLMKYIPNMTSDRALELTNQVHYEGQAIVWVGPQEQAELYHEQLLRAGLTMAPLEPEGS

SEQ ID NO: 580 - protein, 95 aa, Thermosynechococcus elongatus
ASVVPQERQQDTRKHYPNYKVIVLNDDFNTFRHVAACLMKYIPNMTSDIAWELTNQVHYEGQAIVWVGPQEQAELYHEQLLRAGLTMAPLEPEGS

SEQ ID NO: 581 - protein, 95 aa, Thermosynechococcus elongatus; identical to SEQ ID NO: 146

SEQ ID NO: 582 - protein, 95 aa, Thermosynechococcus elongatus
ASVVPQERQQDTRKHYPNYKVIVLNDDFNTFRHVAACFMKYIPNKTSDRAWELTNQVHYEGQAIVWVGPQEQAELYHEQLLRAGLTMAPLEPEGS

SEQ ID NO: 583 - protein, 95 aa, Thermosynechococcus elongatus; identical to SEQ ID NO: 2

SEQ ID NO: 584 - protein, 95 aa, Thermosynechococcus elongatus
ASVVPQERQQDTRKHYPNYKVIVLNDDFYTFRHVAACLMKYIPNKTSDRAWELTNQVHYEGQAIVWVGPQEQAELYHEQLLRAGLTMAPLEPEGS

SEQ ID NO: 585 - protein, 95 aa, Thermosynechococcus elongatus
ASVVPQERQQDTRKHYPNYKVIVLNDYFNTFRHVAACLMKYIPNMTSDRAWELTNQVHYEGQAIVWVGPQEQAELYHEQLLRAGLTMAPLEPEGS

SEQ ID NO: 586 - protein, 95 aa, Thermosynechococcus elongatus
ASVVPQERQQDTSKHYPNYKVIVLNDDFNTFRHVAACLMKYIPNMTSDRAWELTNQVHYEGQAIVWVGPQEQAELYHEQLLRAGLTMAPLEPEGS

SEQ ID NO: 587 - protein, 95 aa, Thermosynechococcus elongatus
ASVVPQERQQVTRKHYPNYKVIVLNDDFNTFRHVAACLMKYIPNKTSDRAWELTNQVHYVGQAIVWVGPQEQAELYHEQLLRAGLTMAPLEPEGS

SEQ ID NO: 588 - protein, 95 aa, Thermosynechococcus elongatus
ASVVPQERQQVTRKHYPNYKVIVLNDDFNTFRHVAACLMKYIPNKTSDRAWELTNQVHYVGQAIVWVGPQVQAELYHEQLLRAGLTMAPLEPGGS

SEQ ID NO: 589 - protein, 95 aa, Thermosynechococcus elongatus; identical to SEQ ID NO: 15

SEQ ID NO: 590 - protein, 95 aa, Thermosynechococcus elongatus; identical to SEQ ID NO: 133

SEQ ID NO: 591 - protein, 95 aa, Thermosynechococcus elongatus
ASVVPQERQQVTRKHHPNYKVIVLNDDFNTFRHVAACLMKYIPNMTSDRAWELTNQVHYEGQAIVWVGPQEQAELYHEQLLRTGLTMAPLEPEGS

SEQ ID NO: 592 - protein, 95 aa, Thermosynechococcus elongatus
ASVVPQERQQVTRKHHPNYKVIVLNDDFNTFRHVAACLMKYIPNMTSDRAWELTNQVHYEGQAIVWVGPQEQAELYHEQLLRAGFTMAPLEPEGS

SEQ ID NO: 593 - protein, 95 aa, Thermosynechococcus elongatus
ASVVPQERQQVTRKHHPNYKVIVLNDDFNTFRHVAACLMKYIPNMTSDRAWELTNQVHYEGQAIVWVGPQVQAELYHEQLLRAGLTMAPLEPEGS

SEQ ID NO: 594 - protein, 95 aa, Thermosynechococcus elongatus; identical to SEQ ID NO: 177

SEQ ID NO: 595 - protein, 95 aa, Thermosynechococcus elongatus
ASVVPQERQQVTRKHYPNYKGIVLNDDFNTFRHVAACLMKYIPNMTSDRAWELTNQVHYKGQAIVWVGPQEQAELNHEQLLRAGLTMAPLEPEGS

SEQ ID NO: 596 - protein, 95 aa, Thermosynechococcus elongatus
ASVVPQERQQVTRKHYPNYKVIVLNDDFNTFQHVAACLMKYIPNMTSDRAWELTNQVHYEGQAIVWVGPQVQAELYHEQLLRAGLTMAPLEPGGS

SEQ ID NO: 597 - protein, 95 aa, Thermosynechococcus elongatus
ASVVPQERQQVTRKHYPNYKVIVLNDDFNTFQHVAACLMKYIPNMTSDRAWELTNQVHYVGQAIVWVGPQEQAELYHEQLLRAGLTMAPLEPKGS

SEQ ID NO: 598 - protein, 95 aa, Thermosynechococcus elongatus
ASVVPQERQQVTRKHYPNYKVIVLNDDFNTFQHVVACLKKYIPNMISDRAWELTNQVHYEGQAIVWVGPQVQAELYHEQLLRAGLTMAPLEPGGS

SEQ ID NO: 599 - protein, 95 aa, Thermosynechococcus elongatus
ASVVPQERQQVTRKHYPNYKVIVLNDDFNTFQHVVACLKKYIPNMISDRAWELTNQVHYGGQAIVWVGPQEQAELYHEQLLRAGLTMAPLEPEGS

SEQ ID NO: 600 - protein, 95 aa, Thermosynechococcus elongatus
ASVVPQERQQVTRKHYPNYKVIVLNDDFNTFRHVAACLMKYIPNMTSDRAWELTNQVHYEGQAIVWVGPREQAELYHEQLLRAGLTMAPLEPGGS

SEQ ID NO: 601 - protein, 95 aa, Thermosynechococcus elongatus
ASVVPQERQQVTRKHYPNYKVIVLNDDFNTFRHVAACLMKYIPNMTSDRAWELTNQVHYEGQAIVWVGPREQAELYHEQLLRVGLTMAPLEPGGS

SEQ ID NO: 602 - protein, 77 aa, Thermosynechococcus elongatus
ASVVPQERQQVTRKHYPNYKVIVLNDDFNTFRHVAACLMKYIPNMTSDRAWELTNQVHYKGQAIVWVGPQEQAELNH

SEQ ID NO: 603 - protein, 95 aa, Thermosynechococcus elongatus; identical to SEQ ID NO: 55

SEQ ID NO: 604 - protein, 95 aa, Thermosynechococcus elongatus
ASVVPQERQQVTRKHYPNYKVIVLNDDFNTFRHVAACLMKYIPNMTSDRAWELTNQVHYKGRAIVWVGPQEQAELYHEQLLRAGLTMAPLEPEGS

SEQ ID NO: 605 - protein, 95 aa, Thermosynechococcus elongatus; identical to SEQ ID NO: 227

SEQ ID NO: 606 - protein, 95 aa, Thermosynechococcus elongatus
ASVVPQEGQQVTRKHYPNYKVIVLNDDFNTFQHVAACLMKYIPNMTSDRAWELTNQVHYGGRAIVWVGPQEQAELYHEQLLRAGLTMAPLEPEGS

SEQ ID NO: 607 - protein, 95 aa, Thermosynechococcus elongatus; identical to SEQ ID NO: 1

SEQ ID NO: 608 - protein, 95 aa, Thermosynechococcus elongatus
ASVVPQEGQQVTRKHYPNYKVIVLNDDFNTFQHVVASLKKYIPNMISDRAWELTNQVHYGGRAIVWVGPQEQAELYHEQLLRAGLTMAPLEPEGS

SEQ ID NO: 609 - protein, 37 aa, Thermosynechococcus elongatus
ASVVPQEGQQVTRKHYPNYKVIVLNDDFNTFQHVVAC

SEQ ID NO: 610 - protein, 95 aa, Thermosynechococcus elongatus
ASVVPQEGQQVTRKHYPNYKVIVLNDDFNTFQHVVACLKKYITNMISDRAWELTNQVHYGGRAIVWVGPQEQAELYHEQLLRAGLTMAPLEPEGS

SEQ ID NO: 611 - protein, 95 aa, Thermosynechococcus elongatus; identical to SEQ ID NO: 501

SEQ ID NO: 612 - protein, 95 aa, Thermosynechococcus elongatus; identical to SEQ ID NO: 1

SEQ ID NO: 613 - protein, 95 aa, Thermosynechococcus elongatus
ASVVPQEGQQVTRKHYPNYKVIVLNDDFNTFQHVVACLKKYIPNMISDRAWELTNKVHYGGRAIVWVGPQEQAELYHEQLLRAGLTMAPLEPEGS

SEQ ID NO: 614 - protein, 95 aa, Thermosynechococcus elongatus
ASVVPQEGQQVTRKHYPNYKVIVLNDDFNTFQHVVACLKKYIPNMISDRAWELTNQVHYKGQAIVWVGPQEQAELYHEQLLRAGLTMAPLEPEGS

SEQ ID NO: 615 - protein, 95 aa, Thermosynechococcus elongatus
ASVVPQEGQQVTRKHYPNYKVIVLNDDFNTFQHVVACLKKYIPNMISDRAWELTNQVHYGGRAIVWVGPQEQAELYHEQWLRAGLTMAPLEPEGS

SEQ ID NO: 616 - protein, 95 aa, Thermosynechococcus elongatus
ASVVPQEGQQVTRKHYPNYKVIVLNDDFNTFQHVVACLKKYIPNMISDRAWELTNQVHYGGRAIVWVGPQEQAELYHEQLWRAGLTMAPLEPEGS

SEQ ID NO: 617 - protein, 95 aa, Thermosynechococcus elongatus
ASVVPQEGQQVTRKHYPNYKVIVLNDDFNTFQHVVACLKKYIPNMISDRAWELTNQVHYGGRAIVWVGPQEQAELYHEQLLRAGLTMAPQEPEGS

SEQ ID NO: 618 - protein, 95 aa, Thermosynechococcus elongatus
ASVVPQEGQQVTRKHYPNYKVIVLNDDFNTFQHVVACLKKYIPNMISDRAWELTNQVHYGGRAIVWVGPQEQAELYHEQLLRAGLTMAPLEQEGS

SEQ ID NO: 619 - protein, 95 aa, Thermosynechococcus elongatus; identical to SEQ ID NO: 182

SEQ ID NO: 620 - protein, 95 aa, Thermosynechococcus elongatus
ASVVPQEGQQVTRKHYPNYKVIVLNDDFNTFQHVVACLKKYIPNMISDRAWELTNQVHYGGRAIVWVGPQEQAELYHEQLLRACLTMAPLEPEGS

SEQ ID NO: 621 - protein, 95 aa, Thermosynechococcus elongatus
ASVVPQEGQQVTRKHYPNYKVIVLNDDFNTFQHVVACLKKYIPNMISDRAWELTNQVHYGGRAIVWVGPQEQAELYHEQLLRSGLTMAPLEPEGS

SEQ ID NO: 622 - protein, 95 aa, Thermosynechococcus elongatus
ASVVPQEGQQVTRKHYPNYKVIVLNDDFNTFQHVVACLKKYIPNMISDRAWELTNQVHYGGRAIVWVGPQEQAELYHEQLFRAGLTMAPLEPEGS

SEQ ID NO: 623 - protein, 95 aa, Thermosynechococcus elongatus
ASVVPQEGQQVTRKHYPNYKVIVLNDDFNTFQHVVACLKKYIPNMISDRAWELTNQVHYGGRAIVWVGPQEQAELYHEHLLRAGLTMAPLEPEGS

SEQ ID NO: 624 - protein, 95 aa, Thermosynechococcus elongatus
ASVVPQEGQQVTRKHYPNYKVIVLNDDFNTFQHVVACLKKYIPNMISDRAWELTNQVHYGGRAIVWVGPQEQAVLYHEQLLRAGLTMAPLEPEGS

SEQ ID NO: 625 - protein, 95 aa, Thermosynechococcus elongatus
ASVVPQEGQQVTRKHYPNYKVIVLNDDFNTFQHVVACLKKYIPNMISDRAWELTNQVHYGGRAIVWVGPREQAELYHEQLLRAGLTMAPLEPEGS

SEQ ID NO: 626 - protein, 95 aa, Thermosynechococcus elongatus
ASVVPQEGQQVTRKHYPNYKVIVLNDDFNTFQHVVACLKKYIPNMISDRAWELTNQVHYGGRAIVLVGPQEQAELYHEQLLRAGLTMAPLEPEGS

SEQ ID NO: 627 - protein, 95 aa, Thermosynechococcus elongatus
ASVVPQEGQQVTRKHYPNYKVIVLNDDFNTFQHVVACLKKYIPNMISDRAWELTNQVHYGGRAIFWVGPQEQAELYHEQLLRAGLTMAPLEPEGS

SEQ ID NO: 628 - protein, 95 aa, Thermosynechococcus elongatus
ASVVPQEGQQVTRKHYPNYKVIVLNDDFNTFQHVVACLKKYIPNMISDRAWELTNQVHYGGRSIVWVGPQEQAELYHEQLLRAGLTMAPLEPEGS

SEQ ID NO: 629 - protein, 95 aa, Thermosynechococcus elongatus; identical to SEQ ID NO: 1

SEQ ID NO: 630 - protein, 95 aa, Thermosynechococcus elongatus
ASVVPQEGQQVTRKHYPNYKVIVLNDDFNTFQHVVACLKKYIPNMISDRAWELTNHVHYGGRAIVWVGPQEQAELYHEQLLRAGLTMAPLEPEGS

SEQ ID NO: 631 - protein, 95 aa, Thermosynechococcus elongatus
ASVVPQEGQQVTRKHYPNYKVIVLNDDFNTFQHVVACLKKYIPNMISDRAWELTNRVHYGGRAIVWVGPQEQAELYHEQLLRAGLTMAPLEPEGS

SEQ ID NO: 632 - protein, 95 aa, Thermosynechococcus elongatus
ASVVPQEGQQVTRKHYPNYKVIVLNDDFNTFQHVVACLKKYIPNMISDRAWEFTNQVHYGGRAIVWVGPQEQAELYHEQLLRAGLTMAPLEPEGS

SEQ ID NO: 633 - protein, 95 aa, Thermosynechococcus elongatus
ASVVPQEGQQVTRKHYPNYKVIVLNDDFNTFQHVVACLKKYIPNMISDRAWDLTNQVHYGGRAIVWVGPQEQAELYHEQLLRAGLTMAPLEPEGS

SEQ ID NO: 634 - protein, 95 aa, Thermosynechococcus elongatus
ASVVPQEGQQVTRKHYPNYKVIVLNDDFNTFQHVVACLKKYIPNMISYRAWELTNQVHYGGRAIVWVGPQEQAELYHEQLLRAGLTMAPLEPEGS

SEQ ID NO: 635 - protein, 95 aa, Thermosynechococcus elongatus; identical to SEQ ID NO: 134

SEQ ID NO: 636 - protein, 95 aa, Thermosynechococcus elongatus
ASVVPQEGQQVTRKHYPNYKVIVLNDDFNTFQHVVACLMKYIPNMTSDRAWELTNQVHYGGRAIVWVGPQEQAELYHEQLLRAGLTMAPLEPEGS

SEQ ID NO: 637 - protein, 95 aa, Thermosynechococcus elongatus
ASVVPQEGQQVTRKHYPNYKVIVLNDDFNTFQHVVACLMKYIPNMISDRAWELTNQVHYGGRAIVWVGPQEQAELYHEQLLRAGLTMAPLEPEGS

SEQ ID NO: 638 - protein, 95 aa, Thermosynechococcus elongatus
ASVVPQEGQQVTRKHYPNYKVIVLNDDFNTFRHVAACLMKYIPNMTSDRAWELTNQVHYTGQAIVWVGPQEQAELNHEQLLRAGLTMAPLEPEGS

SEQ ID NO: 639 - protein, 95 aa, Thermosynechococcus elongatus
ASVVPQEGQQVTRKHYPNYKVIVLNDYFNTFQHVVACLKKYIPNMISDRAWELTNQVHYGGRAIVWVGPQEQAELYHEQLLRAGLTMAPLEPEGS

SEQ ID NO: 640 - protein, 95 aa, Thermosynechococcus elongatus
ASVVPQEGQQVTIKHYPNYKVIVLNDDFNTFQHVVACLKKYIPNMISDRAWELTNQVHYGGRAIVWVGPQEQAELYHEQLLRAGLTMAPLEPEGS

SEQ ID NO: 641 - protein, 95 aa, Thermosynechococcus elongatus
ASVVPQEGQQVARKHYPNYKVIVLNDDFNTFRHVAACLMKYIPNMTSDRAWELTNQVHYEGQAIVWVGPQVQAELYHEQLLRAGLTMAPLEPEGS

SEQ ID NO: 642 - protein, 95 aa, Thermosynechococcus elongatus; identical to SEQ ID NO: 1

SEQ ID NO: 643 - protein, 95 aa, Thermosynechococcus elongatus
ASVVPQVRQQVARKHYPNYKVIVLNDDFNTFRHVAACLMKYIPNMTSDRAWELTNQVHYEGQAIVWVGPQVQAELYHEQLLRAGLTMAPLEPGGS

SEQ ID NO: 644 - protein, 95 aa, Thermosynechococcus elongatus; identical to SEQ ID NO: 2

SEQ ID NO: 645 - protein, 95 aa, Thermosynechococcus elongatus
ASVIPQERQQVTRKHYPNYKVIVLNDDFNTFQHVAACLMKYIPNMTSDRAWELTNQVHYGGQAIVWVGPQEQAVLYHEQLLRAGLTMAPLEPEGS

SEQ ID NO: 646 - protein, 95 aa, Thermosynechococcus elongatus
ASVVQQERQQVTRKHYPNYKVIVLNDDFNTFRHVAACLMKYIPNMTSDRAWELTNQVHYKGQAIVWVGPQEQAELNHEQLLRAGLTMAPLEPEGS

SEQ ID NO: 647 - protein, 95 aa, Thermosynechococcus elongatus; identical to SEQ ID NO: 13

SEQ ID NO: 648 - protein, 95 aa, Thermosynechococcus elongatus; identical to SEQ ID NO: 15

SEQ ID NO: 649 - protein, 95 aa, Thermosynechococcus elongatus
ASVVPQERQQVARKHYPNYKVIVLNDDLNTFRHVAACLMKYIPNMTSDRAWELTNQVHYEGQAIVWVGPQVQAELYHEQLLRAGLTMAPLEPGGS

SEQ ID NO: 650 - protein, 95 aa, Thermosynechococcus elongatus
ASVVPQERQQVARKHYPNYKVIVLNDDFNTVRHVAACLMKYIPNMTSDRAWELTNQVHYEGQAIVWVGPQVQAELYHEQLLRAGLTMAPLEPGGS

SEQ ID NO: 651 - protein, 95 aa, Thermosynechococcus elongatus
ASVVPQERQQVARKHYPNYKVIVLNDDFNTYRHVAACLMKYIPNMTSDRAWELTNQVHYEGQAIVWVGPQVQAELYHEQLLRAGLTMAPLEPGGS

SEQ ID NO: 652 - protein, 95 aa, Thermosynechococcus elongatus
ASVVPQERQQVARKHYPNYKVIVLNDDFNTFQHVVACLKKYIPNMISDRAWELTNQVHYGGRAIVWVGPQEQAELNHEQLLRAGLTMAPLEPEGS

SEQ ID NO: 653 - protein, 95 aa, Thermosynechococcus elongatus
ASVVPQERQQVARKHYPNYKVIVLNDDFNTFRHGAACLMKYIPNMTSDRAWELTNQVHYEGQAIVWVGPQVQAELYHEQLLRAGLTMAPLEPGGS

SEQ ID NO: 654 - protein, 95 aa, Thermosynechococcus elongatus
ASVVPQERQQVARKHYPNYKVIVLNDDFNTFRHVAACLMKYITNMTSDRAWELTNQVHYEGQAIVWVGPQVQAELYHEQLLRAGLTMAPLEPGGS

SEQ ID NO: 655 - protein, 95 aa, Thermosynechococcus elongatus
ASVVPQERQQVARKHYPNYKVIVLNDDFNTFRHVAACLMKYIQNMTSDRAWELTNQVHYEGQAIVWVGPQVQAELYHEQLLRAGLTMAPLEPGGS

SEQ ID NO: 656 - protein, 95 aa, Thermosynechococcus elongatus
ASVVPQERQQVARKHYPNYKVIVLNDDFNTFRHVAACLMKYIPNMTYDRAWELTNQVHYEGQAIVWVGPQVQAELYHEQLLRAGLTMAPLEPGGS

SEQ ID NO: 657 - protein, 95 aa, Thermosynechococcus elongatus; identical to SEQ ID NO: 35

SEQ ID NO: 658 - protein, 95 aa, Thermosynechococcus elongatus; identical to SEQ ID NO: 284

SEQ ID NO: 659 - protein, 95 aa, Thermosynechococcus elongatus
ASVVPQERQQVARKHYPNYKVIVLNDDFNTFRHVAACLMKYIPNMTSDRAWELTNQVHYEGQDIVWVGPQVQAELYHEQLLRAGLTMAPLEPGGS

SEQ ID NO: 660 - protein, 95 aa, Thermosynechococcus elongatus; identical to SEQ ID NO: 96

SEQ ID NO: 661 - protein, 95 aa, Thermosynechococcus elongatus
ASVVPQERQQVARKHYPNYKVIVLNDDFNTFRHVAACLMKYIPNMTSDRAWELTNQVHYEGQAIVWVGPQEQAELYHEQLLRAGLTIAPLEPEGS

SEQ ID NO: 662 - protein, 77 aa, Thermosynechococcus elongatus
ASVVPQERQQVARKHYPNYKVIVLNDDFNTFRHVAACLMKYIPNMTSDRAWELTNQVHYEGQAIVWVGPQEQAELYH

SEQ ID NO: 663 - protein, 95 aa, Thermosynechococcus elongatus
ASVVPQERQQVARKHYPNYKVIVLNDDFNTFRHVAACLMKYIPNMTSDRAWELTNQVHYEGQAIVWVGPQVQAELYHEQLLKAGLTMAPLEPGGS

SEQ ID NO: 664 - protein, 95 aa, Thermosynechococcus elongatus
ASVVPQERQQVARKHYPNYKVIVLNDDFNTFRHVAACLMKYIPNMTSDRAWELTNQVHYEGQAIVWVGPQVQAELYHEQLLRAGLTRAPLEPEGS

SEQ ID NO: 665 - protein, 95 aa, Thermosynechococcus elongatus; identical to SEQ ID NO: 338

SEQ ID NO: 666 - protein, 95 aa, Thermosynechococcus elongatus; identical to SEQ ID NO: 3

SEQ ID NO: 667 - protein, 95 aa, Thermosynechococcus elongatus; identical to SEQ ID NO: 3

SEQ ID NO: 668 - protein, 95 aa, Thermosynechococcus elongatus
ASVVPQERQQVARKHYPNYKVIVLNDDFNTFRHVAACLMKYIPNMTSDRAWELTNQVHYEGQAIVWVGPQVQAELYHEQLLRAGLTMAPLERGGS

SEQ ID NO: 669 - protein, 95 aa, Thermosynechococcus elongatus; identical to SEQ ID NO: 3

SEQ ID NO: 670 - protein, 95 aa, Thermosynechococcus elongatus
ASVVPQERQQVARKHYPNYKVIVLNDDFNTFRHVAACLMKYIPNMTSDRAWELTNQVHYEGQAIVWVGPQVQAELYHEQLLRAGLTLAPLEPGGS

SEQ ID NO: 671 - protein, 95 aa, Thermosynechococcus elongatus
ASVVPQERQQVARKHYPNYKVIVLNDDFNTFRHVAACLMKYIPNMTSDRAWELTNQVHYEGQAIVWVGPQVQAELYHEQLLRVGLTMAPLEPGGS

SEQ ID NO: 672 - protein, 95 aa, Thermosynechococcus elongatus
ASVVPQERQQVARKHYPNYKVIVLNDDFNTFRHVAACLMKYIPNMTSDRAWELTNQVHYEGQAIVWVGPQVQAELYHEQLLIAGLTMAPLEPGGS

SEQ ID NO: 673 - protein, 95 aa, Thermosynechococcus elongatus
ASVVPQERQQVARKHYPNYKVIVLNDDFNTFRHVAACLMKYIPNMTSDRAWELTNQVHYEGQAIVWVGPQVQAELYHEHLLRAGLTMAPLEPGGS

SEQ ID NO: 674 - protein, 95 aa, Thermosynechococcus elongatus
ASVVPQERQQVARKHYPNYKVIVLNDDFNTFRHVAACLMKYIPNMTSDRAWELTNQVHYEGQSIVWVGPQVQAELYHEQLLRAGLTMAPLEPGGS

SEQ ID NO: 675 - protein, 95 aa, Thermosynechococcus elongatus
ASVVPQERQQVARKHYPNYKVIVLNDDFNTFRHVAACLMKYIPNMTSDRAWELTNHVHYEGQAIVWVGPQVQAELYHEQLLRAGLTMAPLEPGGS

SEQ ID NO: 676 - protein, 95 aa, Thermosynechococcus elongatus; identical to SEQ ID NO: 3

SEQ ID NO: 677 - protein, 95 aa, Thermosynechococcus elongatus
ASVVPQERQQVARKHYPNYKVIVLNDDFNTFRHVAACFMKYIPNMTSDRAWELTNQVHYEGQAIVWVGPQVQAELYHEQLLRAGLTMAPLEPGGS

SEQ ID NO: 678 - protein, 95 aa, Thermosynechococcus elongatus; identical to SEQ ID NO: 3

SEQ ID NO: 679 - protein, 95 aa, Thermosynechococcus elongatus; identical to SEQ ID NO: 90

SEQ ID NO: 680 - protein, 95 aa, Thermosynechococcus elongatus
ASVVPQERQQVARKHYPNYKVIVFNDDFNTFRHVAACLMKYIPNMTSDRAWELTNQVHYEGQAIVWVGPQVQAELYHEQLLRAGLTMAPLEPGGS

SEQ ID NO: 681 - protein, 95 aa, Thermosynechococcus elongatus
ASVVPQERQQVARNHYPNYKVIVLNDDFNTFRHVAACLMKYIPNMTSDRAWELTNQVHYEGQAIVWVGPQVQAELYHEQLLRAGLTMAPLEPGGS

SEQ ID NO: 682 - protein, 95 aa, Thermosynechococcus elongatus
ASVVPQERQQVARQHYPNYKVIVLNDDFNTFRHVAACLMKYIPNMTSDRAWELTNQVHYEGQAIVWVGPQVQAELYHEQLLRAGLTMAPLEPGGS

SEQ ID NO: 683 - protein, 95 aa, Thermosynechococcus elongatus; identical to SEQ ID NO: 3

SEQ ID NO: 684 - protein, 95 aa, Thermosynechococcus elongatus
ASVVPQERQQDTRKHYQNYKVIVLNDDFNTFQHVVACLKKYIPNMISDRAWELTNQVHYGGRAIVWVGPQEQAELYHEQLLRAGLTMAPLEPEGS

SEQ ID NO: 685 - protein, 95 aa, Thermosynechococcus elongatus
ASVVPQERQQDTRKHYPNYKGIVLNDDFNTFRHVAACLMKYIPNMTSDRAWELTNQVHYEGQAIVWVGPQEQAELYHEQLLRAGLTMAPLEPEGS

SEQ ID NO: 686 - protein, 95 aa, Thermosynechococcus elongatus; identical to SEQ ID NO: 7

SEQ ID NO: 687 - protein, 95 aa, Thermosynechococcus elongatus
ASVVPQERQQDTRKHYPNYKVIILNDDFNTFQHVAACLKKYIPNMISDRAWELTNQVHYGGRAIVWVGPQEQAELYHEQLLRAGLTMAPLEPEGS

SEQ ID NO: 688 - protein, 95 aa, Thermosynechococcus elongatus
ASVVPQERQQDTRKHYPNYKVIDLNDDFNTFRHVAACLMKYIPNMTSDRAWELTNQVHYEGQAIVWVGPQEQAELYHEQLLRAGLTMAPLEPEGS

SEQ ID NO: 689 - protein, 95 aa, Thermosynechococcus elongatus
ASVVPQERQQDTRKHYPNYKVIVLNDDFNTFQHVVACLKKYIPNKTSDRAWELTNQVHYEGQAIVWVGPQEQAELYHEQLLRAGLTMAPLEPEGS

SEQ ID NO: 690 - protein, 95 aa, Thermosynechococcus elongatus
ASVVPQERQQDTRKHYPNYKVIVLNDDFNTFQHVVACLKKYIPNMISDRAWELTNQVHYGGRAIVWVGPQEQAELNHEQLLRAGLTMAPLEPEGS

SEQ ID NO: 691 - protein, 95 aa, Thermosynechococcus elongatus
ASVVPQERQQDTRKHYPNYKVIVLNDDFNTFQHVVACLMKYIPNKTSDRAWELTNQVHYEGQAIVWVGPQEQAELYHEQLLRAGLTMAPLEPEGS

SEQ ID NO: 692 - protein, 95 aa, Thermosynechococcus elongatus; identical to SEQ ID NO: 2

SEQ ID NO: 693 - protein, 36 aa, Thermosynechococcus elongatus; identical to SEQ ID NO: 556

SEQ ID NO: 694 - protein, 95 aa, Thermosynechococcus elongatus
ASVVPQERQQDTRKHYPNYKVIVLNDDFNTFRHVAACLKKYIPNMISDRAWELTNQVHYEGQAIVWVGPQEQAELYHEQLLRAGLTMAPLEPEGS

SEQ ID NO: 695 - protein, 95 aa, Thermosynechococcus elongatus; identical to SEQ ID NO: 4

SEQ ID NO: 696 - protein, 95 aa, Thermosynechococcus elongatus
ASVVPQERQQDTRKHYPNYKVIVLNDDFNTFRHVAACLMKYIPNKTSDRAWELTNQVHYEGKAIVWVGPQEQAELYHEQLLRAGLTMAPLEPEGS

SEQ ID NO: 697 - protein, 95 aa, Thermosynechococcus elongatus; identical to SEQ ID NO: 4

SEQ ID NO: 698 - protein, 95 aa, Thermosynechococcus elongatus
ASVVPQERQQDTRKHYPNYKVIVLNDDFNTFRHVAACLMKYIPNKTSDRAWELTNQVHYEGQAIVWVGQQEQAELYHEQLLRAGLTMAPLEPEGS

SEQ ID NO: 699 - protein, 95 aa, Thermosynechococcus elongatus; identical to SEQ ID NO: 4

SEQ ID NO: 700 - protein, 95 aa, Thermosynechococcus elongatus
ASVVPQERQQDTRKHYPNYKVIVLNDDFNTFRHVAACLMKYIPNKTSDRAWELTNQVHYEGQAIVWVGPQEQAELYHEQLLRAGLTMAQLEPEGS

SEQ ID NO: 701 - protein, 92 aa, Thermosynechococcus elongatus
ASVVPQERQQDTRKHYPNYKVIVLNDDFNTFRHVAACLMKYIPNKTSDRAWELTNQVHYEGQAIVWVGPQEQAELYHEQLLRAGLTMAPLEP

SEQ ID NO: 702 - protein, 95 aa, Thermosynechococcus elongatus
ASVVPQERQQDTRKHYPNYKVIVLNDDFNTFRHVAACLMKYIPNKTSDRAWELTNQVHYEGQAIVWVGPQEQAELYHEQLLRAGLTMAPLDPEGS

SEQ ID NO: 703 - protein, 95 aa, Thermosynechococcus elongatus
ASVVPQERQQDTRKHYPNYKVIVLNDDFNTFRHVAACLMKYIPNKTSDRAWELTNQVHYEGQAIVWVGPQEQAELYHEQLLRAGLTMAPFEPEGS

SEQ ID NO: 704 - protein, 95 aa, Thermosynechococcus elongatus; identical to SEQ ID NO: 234

SEQ ID NO: 705 - protein, 95 aa, Thermosynechococcus elongatus
ASVVPQERQQDTRKHYPNYKVIVLNDDFNTFRHVAACLMKYIPNKTSDRAWELTNQVHYEGQAIVWVGPQEQAELYHEQLLRAGFTMAPLEPEGS

SEQ ID NO: 706 - protein, 95 aa, Thermosynechococcus elongatus
ASVVPQERQQDTRKHYPNYKVIVLNDDFNTFRHVAACLMKYIPNKTSDRAWELTNQVHYEGQAIVWVGPQEQAELYHELLLRAGLTMAPLEPEGS

SEQ ID NO: 707 - protein, 95 aa, Thermosynechococcus elongatus; identical to SEQ ID NO: 4

SEQ ID NO: 708 - protein, 95 aa, Thermosynechococcus elongatus
ASVVPQERQQDTRKHYPNYKVIVLNDDFNTFRHVAACLMKYIPNKTSDRAWELTNQVHYEGQAIVCVGPQEQAELYHEQLLRAGLTMAPLEPEGS

SEQ ID NO: 709 - protein, 95 aa, Thermosynechococcus elongatus
ASVVPQERQQDTRKHYPNYKVIVLNDDFNTFRHVAACLMKYIPNKTSDRAWELTNQVYYEGQAIVWVGPQEQAELYHEQLLRAGLTMAPLEPEGS

SEQ ID NO: 710 - protein, 95 aa, Thermosynechococcus elongatus
ASVVPQERQQDTRKHYPNYKVIVLNDDFNTFRHVAACLMKYIPNKTSDRAWEFTNQVHYEGQAIVWVGPQEQAELYHEQLLRAGLTMAPLEPEGS

SEQ ID NO: 711 - protein, 95 aa, Thermosynechococcus elongatus
ASVVPQERQQDTRKHYPNYKVIVLNDDFNTFRHVAACLMKYIPNNTSDRAWELTNQVHYEGQAIVWVGPQEQAELYHEQLLRAGLTMAPLEPEGS

SEQ ID NO: 712 - protein, 95 aa, Thermosynechococcus elongatus
ASVVPQERQQDTRKHYPNYKVIVLNDDFNTFRHVAACLMKYIPNMTSDRAWESTNQVHYEGQAIVWVGPQEQAELYHEQLLRAGLTMAPLEPEGS

SEQ ID NO: 713 - protein, 95 aa, Thermosynechococcus elongatus
ASVVPQERQQDTRKHYPNYKVIVLNDDFNTFRHVAACLMKYIPNMTSDRAWELTNQLHYEGQAIVWVGPQEQAELYHEQLLRAGLTMAPLEPEGS

SEQ ID NO: 714 - protein, 95 aa, Thermosynechococcus elongatus
ASVVPQERQQDTRKHYPNYKVIVLNDDFNTFRHVAACLMKYIPNMTSDRAWELTNQVHYEAQAIVWVGPQEQAELYHEQLLRAGLTMAPLEPEGS

SEQ ID NO: 715 - protein, 95 aa, Thermosynechococcus elongatus; identical to SEQ ID NO: 2

SEQ ID NO: 716 - protein, 95 aa, Thermosynechococcus elongatus; identical to SEQ ID NO: 7

SEQ ID NO: 717 - protein, 95 aa, Thermosynechococcus elongatus
ASVVPQERQQDTRKHYPNYKVIVLNDDFNTFRHVAACLMKYIPNMTSDRAWELTNQVHYEGQAIDWVGPQEQAELYHEQLLRAGLTMAPLEPEGS

SEQ ID NO: 718 - protein, 95 aa, Thermosynechococcus elongatus
ASVVPQERQQDTRKHYPNYKVIVLNDDFNTFRHVAACLMKYIPNMTSDRAWELTNQVHYEGQAIVWIGPQEQAELYHEQLLRAGLTMAPLEPEGS

SEQ ID NO: 719 - protein, 95 aa, Thermosynechococcus elongatus
ASVVPQERQQDTRKHYPNYKVIVLNDDFNTFRHVAACLMKYIPNMTSDRAWELTNQVHYEGQAIVWVGPQEQAELYHEQMLRAGLTMAPLEPEGS

SEQ ID NO: 720 - protein, 79 aa, Thermosynechococcus elongatus
ASVVPQERQQDTRKHYPNYKVIVLNDDFNTFRHVAACLMKYIPNMTSDRAWELTNQVHYEGQAIVWVGPQEQAELYHEQ

SEQ ID NO: 721 - protein, 95 aa, Thermosynechococcus elongatus; identical to SEQ ID NO: 2

SEQ ID NO: 722 - protein, 90 aa, Thermosynechococcus elongatus; identical to SEQ ID NO: 476

SEQ ID NO: 723 - protein, 95 aa, Thermosynechococcus elongatus; identical to SEQ ID NO: 2

SEQ ID NO: 724 - protein, 95 aa, Thermosynechococcus elongatus
ASVVPQERQQDTRKHYPNYKVIVLNDDFNTFRHVAACLMKYIPNMTSDRAWELTNQVHYEGQAIVWVGPQEQAELYHEQLLRAGLTMSPLEPEGS

SEQ ID NO: 725 - protein, 95 aa, Thermosynechococcus elongatus
ASVVPQERQQDTRKHYPNYKVIVLNDDFNTFRHVAACLMKYIPNMTSDRAWELTNQVHYEGQAIVWVGPQEQAELYHEQLLRAGLAMAPLEPEGS

SEQ ID NO: 726 - protein, 95 aa, Thermosynechococcus elongatus
ASVVPQERQQDTRKHYPNYKVIVLNDDFNTFRHVAACLMKYIPNMTSDRAWELTNQVHYEGQAIVWVGPQEQAELYHEQLLRAGLSMAPLEPEGS

SEQ ID NO: 727 - protein, 95 aa, Thermosynechococcus elongatus
ASVVPQERQQDTRKHYPNYKVIVLNDDFNTFRHVAACLMKYIPNMTSDRAWELTNQVHYEGQAIVWVGPQEQAELYHEQLLRSGLTMAPLEPEGS

SEQ ID NO: 728 - protein, 95 aa, Thermosynechococcus elongatus
ASVVPQERQQDTRKHYPNYKVIVLNDDFNTFRHVAACLMKYIPNMTSDRAWELTNQVHYEGQAIVWVGPQEQAELYHEQLLSAGLTMAPLEPEGS

SEQ ID NO: 729 - protein, 95 aa, Thermosynechococcus elongatus
ASVVPQERQQDTRKHYPNYKVIVLNDDFNTFRHVAACLMKYIPNMTSDRAWELTNQVHYEGQAIVWVGPQEQAELYHEQLFRAGLTMAPLEPEGS

SEQ ID NO: 730 - protein, 95 aa, Thermosynechococcus elongatus
ASVVPQERQQDTRKHYPNYKVIVLNDDFNTFRHVAACLMKYIPNMTSDRAWELTNQVHYEGQAIVWVGPQEQAELYHERLLRAGLTMAPLEPEGS

SEQ ID NO: 731 - protein, 95 aa, Thermosynechococcus elongatus
ASVVPQERQQDTRKHYPNYKVIVLNDDFNTFRHVAACLMKYIPNMTSDRAWELTNQVHYEGQAIVWVGPQEQAVLYHEQLLRAGLTMAPLEPEGS

SEQ ID NO: 732 - protein, 73 aa, Thermosynechococcus elongatus
ASVVPQERQQDTRKHYPNYKVIVLNDDFNTFRHVAACLMKYIPNMTSDRAWELTNQVHYEGQAIVWVGPQEQA

SEQ ID NO: 733 - protein, 95 aa, Thermosynechococcus elongatus
ASVVPQERQQDTRKHYPNYKVIVLNDDFNTFRHVAACLMKYIPNMTSDRAWELTNQVHYEGQAIVWVGPQVQAELYHEQLLRAGLTRAPLEPGGS

SEQ ID NO: 734 - protein, 95 aa, Thermosynechococcus elongatus; identical to SEQ ID NO: 7

SEQ ID NO: 735 - protein, 95 aa, Thermosynechococcus elongatus
ASVVPQERQQDTRKHYPNYKVIVLNDDFNTFRHVAACLMKYIPNMTSDRAWELTNQVHYGGQAIVWVGPQEQAELYHEQLLRAGLTMAPLEPEGS

SEQ ID NO: 736 - protein, 59 aa, Thermosynechococcus elongatus
ASVVPQERQQDTRKHYPNYKVIVLNDDFNTFRHVAACLMKYIPNMTSDRAWELTNQVHY

SEQ ID NO: 737 - protein, 95 aa, Thermosynechococcus elongatus; identical to SEQ ID NO: 482

SEQ ID NO: 738 - protein, 95 aa, Thermosynechococcus elongatus
ASVVPQERQQDTRKHYPNYKVIVLNDDFNTFRHVAACLMKYIPNMTSDRSWELTNQVHYEGQAIVWVGPQEQAELYHEQLLRAGLTMAPLEPEGS

SEQ ID NO: 739 - protein, 95 aa, Thermosynechococcus elongatus
ASVVPQERQQDTRKHYPNYKVIVLNDDFNTFRHVAACLMKYIPNMISDRAWELTNQVHYKGQAIVWVGPQEQAELNHEQLLRAGLTMAPLEPEGS

SEQ ID NO: 740 - protein, 95 aa, Thermosynechococcus elongatus
ASVVPQERQQDTRKHYPNYKVIVLNDDFNTFRHVAACLMKYIPNMISDRAWELTNQVHYGGRAIVWVGPQEQAELYHEQLLRAGLTMAPLEPGGS

SEQ ID NO: 741 - protein, 95 aa, Thermosynechococcus elongatus
ASVVPQERQQDTRKHYPNYKVIVLNDDFNTFRHVAACLMKYIPNITSDRAWELTNQVHYEGQAIVWVGPQEQAELYHEQLLRAGLTMAPLEPEGS

SEQ ID NO: 742 - protein, 95 aa, Thermosynechococcus elongatus
ASVVPQERQQDTRKHYPNYKVIVLNDDFNTFRHVAACLMKYIPNVTSDRAWELTNQVHYEGQAIVWVGPQEQAELYHEQLLRAGLTMAPLEPEGS

SEQ ID NO: 743 - protein, 95 aa, Thermosynechococcus elongatus
ASVVPQERQQDTRKHYPNYKVIVLNDDFNTFRHVAACLIKYIPNMTSDRAWELTNQVHYEGQAIVWVGPQEQAELYHEQLLRAGLTMAPLEPEGS

SEQ ID NO: 744 - protein, 95 aa, Thermosynechococcus elongatus
ASVVPQERQQDTRKHYPNYKVIVLNDDFNTFRHVAVCLMKYIPNMTSDRAWELTNQVHYEGQAIVWVGPQEQAELYHEQLLRAGLTMAPLEPEGS

SEQ ID NO: 745 - protein, 95 aa, Thermosynechococcus elongatus
ASVVPQERQQDTRKHYPNYKVIVLNDDFNTFRHVASCLMKYIPNMTSDRAWELTNQVHYEGQAIVWVGPQEQAELYHEQLLRAGLTMAPLEPEGS

SEQ ID NO: 746 - protein, 95 aa, Thermosynechococcus elongatus
ASVVPQERQQDTRKHYPNYKVIVLNDDFNTFRHVVACLKKYIPNMISDRAWELTNQVHYGGRAIVWVGPQVQAELYHEQLLRAGLTMAPLEPGGS

SEQ ID NO: 747 - protein, 95 aa, Thermosynechococcus elongatus
ASVVPQERQQDTRKHYPNYKVIVLNDDFNSFRHVAACLMKYIPNMTSDRAWELTNQVHYEGQAIVWVGPQEQAELYHEQLLRAGLTMAPLEPEGS

SEQ ID NO: 748 - protein, 95 aa, Thermosynechococcus elongatus
ASVVPQERQQDTRKHYPNYKVIVLNYDFNTFRHVAACLMKYIPNKTSDRAWELTNQVHYEGQAIVWVGPQEQAELYHEQLLRAGLTMAPLEPEGS

SEQ ID NO: 749 - protein, 95 aa, Thermosynechococcus elongatus
ASVVPQERQQDTRKHYPNYKVIVFNDDFNTFRHVAACLMKYIPNMTSDRAWELTNQVHYEGQAIVWVGPQEQAELYHEQLLRAGLTMAPLEPEGS

SEQ ID NO: 750 - protein, 95 aa, Thermosynechococcus elongatus
ASVVPQERQQDTRKHYPNYNVIVLNDDFNTFRHVAACLMKYIPNKTSDRAWELTNQVHYEGQAIVWVGPQEQAELYHEQLLRAGLTMAPLEPEGS

SEQ ID NO: 751 - protein, 95 aa, Thermosynechococcus elongatus
ASVVPQERQQDTRKHYPNCKVIVLNDDFNTFRHVAACLMKYIPNMTSDRAWELTNQVHYEGQAIVWVGPQEQAELYHEQLLRAGLTMAPLEPEGS

SEQ ID NO: 752 - protein, 95 aa, Thermosynechococcus elongatus
ASVVPQERQQDTRKLYPNYKVIVLNDDFNTFRHVAACLMKYIPNMTSDRAWELTNQVHYEGQAIVWVGPQEQAELYHEQLLRAGLTMAPLEPEGS

SEQ ID NO: 753 - protein, 95 aa, Thermosynechococcus elongatus
ASVVPQERQQDTRNHYPNYKVIVLNDDFNTFRHVAACLMKYIPNKTSDRAWELTNQVHYEGQAIVWVGPQEQAELYHEQLLRAGLTMAPLEPEGS

SEQ ID NO: 754 - protein, 95 aa, Thermosynechococcus elongatus
ASVVPQERQQDTRTHYPNYKVIVLNDDFNTFRHVAACLMKYIPNMTSDRAWELTNQVHYEGQAIVWVGPQEQAELYHEQLLRAGLTMAPLEPEGS

SEQ ID NO: 755 - protein, 13 aa, Thermosynechococcus elongatus
ASVVPQERQQDTR

SEQ ID NO: 756 - protein, 95 aa, Thermosynechococcus elongatus
ASVVPQERQQDPRKHYPNYKVIVLNDDFNTFRHVAACLMKYIPNKTSDRAWELTNQVHYEGQAIVWVGPQEQAELYHEQLLRAGLTMAPLEPEGS

SEQ ID NO: 757 - protein, 95 aa, Thermosynechococcus elongatus
ASVVPQERQQDPRKHYPNYKVIVLNDDFNTFRHVAACLMKYIPNMTSDRAWELTNQVHYEGQAIVWVGPQVQAELYHEQLLRAGLTMAPLEPGGS

SEQ ID NO: 758 - protein, 95 aa, Thermosynechococcus elongatus; identical to SEQ ID NO: 199

SEQ ID NO: 759 - protein, 95 aa, Thermosynechococcus elongatus; identical to SEQ ID NO: 5

SEQ ID NO: 760 - protein, 95 aa, Thermosynechococcus elongatus; identical to SEQ ID NO: 5

SEQ ID NO: 761 - protein, 95 aa, Thermosynechococcus elongatus
ASVVPQERQQVTRKHYPNYKVIVLNDDFNTFQHVAACLMKYIPNMTSDRAWELTNQVHYEGQAIVRVGPQEQAELYHKQLLRAGLTMAPLEPEGS

SEQ ID NO: 762 - protein, 95 aa, Thermosynechococcus elongatus
ASVVPQERQQVTRKHYPNYKVIVLNDDFNTFQHVAACLMKYIPNMTSDRAWELTNLVHYEGQAIVWVGPQEQAELYHEQLLRAGLTMAPLEPEGS

SEQ ID NO: 763 - protein, 95 aa, Thermosynechococcus elongatus
ASVVPQERQQVTRKHYPNYKVIVLNDDFNTFQHVVACLKKYIPNMTSDRAWELTNQVHYEGQAIVWVGPQVQAELYHEQLLRAGLTMAPLEPGGS

SEQ ID NO: 764 - protein, 95 aa, Thermosynechococcus elongatus
ASVVPQERQQVTRKHYPNYKVIVLNDDFNTFQHVVACLMKYIPNMTSDRAWELTNQVHYEGQAIVWVGPQEQAELYHEQLLRAGLTMAPLEPEGS

SEQ ID NO: 765 - protein, 95 aa, Thermosynechococcus elongatus
ASVVPQERQQVTRKHYPNYKVIVLNDDFNTFRHVATCLMKYIPNMTSDRAWELTNQVHYKGQAIVWVGPQEQAELNHEQLLRAGLTMAPLEPEGS

SEQ ID NO: 766 - protein, 95 aa, Thermosynechococcus elongatus
ASVVPQERQQVTRKHYPNYKVIVLNDDFNTFRHVAACLMKYNPNMTSDRAWELTNQVHYKGQAIVWVGPQEQAELNHEQLLRAGLTMAPLEPEGS

SEQ ID NO: 767 - protein, 95 aa, Thermosynechococcus elongatus
ASVVPQERQQVTRKHYPNYKVIVLNDDFNTFRHVAACLMKYIQNMTSDRAWELTNQVHYKGQAIVWVGPQEQAELNHEQLLRAGLTMAPLEPEGS

SEQ ID NO: 768 - protein, 95 aa, Thermosynechococcus elongatus; identical to SEQ ID NO: 15

SEQ ID NO: 769 - protein, 95 aa, Thermosynechococcus elongatus
ASVVPQERQQVTRKHYPNYKVIVLNDDFNTFRHVAACLMKYIPNMTSDRAWELTNQVHYVGQAIVWVGPQEQAELYHEQLLRAGLTMAPLEPKGS

SEQ ID NO: 770 - protein, 95 aa, Thermosynechococcus elongatus
ASVVPQERQQVTRKHYPNYKVIVLNDDFNTFRHVAACLMKYIPNMISDRAWELTNQVHYEGQAIVWVGPQEQAELYHEQLLRAGLTMAPLEPEGS

SEQ ID NO: 771 - protein, 95 aa, Thermosynechococcus elongatus
ASVVPQERQQVTRKHYPNYKVIVLNDDFNTFRHVAACLMKYIPNMTSDRAWELTNQVHYKGQAIVWVGQQEQAELNHEQLLRAGLTMAPLEPEGS

SEQ ID NO: 772 - protein, 95 aa, Thermosynechococcus elongatus
ASVVPQERQQVTRKHYPNYKVIVLNDDFNTFRHVAACLMKYIPNMTSDRAWELTNQVHYKGQAIVWVGPQEQAELNHEQVLRAGLTMAPLEPEGS

SEQ ID NO: 773 - protein, 95 aa, Thermosynechococcus elongatus
ASVVPQERQQVTRKHYPNYKVIVLNDDFNTFRHVAACLMKYIPNMTSDRAWELTNQVHYKGQAIVWVGPQEQAELNHEQLLRAGLTIAPLEPEGS

SEQ ID NO: 774 - protein, 95 aa, Thermosynechococcus elongatus
ASVVPQERQQVTRKHYPNYKVIVLNDDFNTFRHVAACLMKYIPNMTSDRAWELTNQVHYKGQAIVWVGPQEQAELNHEQLLRAGLAMAPLEPEGS

SEQ ID NO: 775 - protein, 95 aa, Thermosynechococcus elongatus
ASVVPQERQQVTRKHYPNYKVIVLNDDFNTFRHVAACLMKYIPNMTSDRAWELTNQVHYKGQAIVWVGPQEQAELYHEQLLRAGLTMAPLEPKGS

SEQ ID NO: 776 - protein, 95 aa, Thermosynechococcus elongatus
ASVVPQERQQVTRKHYPNYKVIVLNDDFNTFRHVAACLMKYIPNMTSDRAWELTNQVHYKGLAIVWVGPQEQAELNHEQLLRAGLTMAPLEPEGS

SEQ ID NO: 777 - protein, 95 aa, Thermosynechococcus elongatus; identical to SEQ ID NO: 105

SEQ ID NO: 778 - protein, 95 aa, Thermosynechococcus elongatus
ASVVPQERQQVTRKHYPNYKVIVLNDDFNTFRHVAACLMKYIPNMTSDRAWELTNQVHYGGRAIVWVGPQEQAELYHEQLLRAGLTMAPLEPGGS

SEQ ID NO: 779 - protein, 95 aa, Thermosynechococcus elongatus
ASVVPQERQQVTRKHYPNYKVIVLNDDFNTFRHVAACLMKYIPNMTSDRALELTNQVHYKGQAIVWVGPQEQAELNHEQLLRAGLTMAPLEPEGS

SEQ ID NO: 780 - protein, 95 aa, Thermosynechococcus elongatus; identical to SEQ ID NO: 5

SEQ ID NO: 781 - protein, 95 aa, Thermosynechococcus elongatus
ASVVPQERQQVTRKHYSNYKVIVLNDDFNTFQHVAACLMKYIPNMTSDRAWELTNQVHYEGQAIVWVGPQEQAELYHEQLLRAGMTMAPLEPEGS

SEQ ID NO: 782 - protein, 95 aa, Thermosynechococcus elongatus
ASVVPQERQQVTRKHYSNYKVIVLNDDFNTFRHVAACLMKYIPNMTSDRAWELTNQVHYEGQAIVWVGPQVQAELYHEQLLRAGLTMAPLEPGGS

SEQ ID NO: 783 - protein, 95 aa, Thermosynechococcus elongatus
ASVVPQERQQVARKHYPNYKVIVLNDDFNTFQHVAACLMKYIPNMTSDRAWELTNQVHYKGQAIVWVGPQEQAELNHEQLLRAGLTMAPLEPEGS

SEQ ID NO: 784 - protein, 95 aa, Thermosynechococcus elongatus; identical to SEQ ID NO: 54

SEQ ID NO: 785 - protein, 95 aa, Thermosynechococcus elongatus
ASVVPQERQQYTRKHYPNYKVIVLNDDFNTFRHVAACLMKYIPNMTSDRAWELTNQVHYEGQAIVWVGPQEQAELYHEQLLRAGLTMAPLEPEGS

SEQ ID NO: 786 - protein, 9 aa, Thermosynechococcus elongatus
ASVVPQERQ

SEQ ID NO: 787 - protein, 95 aa, Thermosynechococcus elongatus
ASVVPQEGQQDTRKHYPNYKVIVLNDDFNTFRHVAACLMKYIPNMTSDRAWELTNQVHYKGQAIVWVGPQEQAELNHEQLLRAGLTMAPLEPEGS

SEQ ID NO: 788 - protein, 95 aa, Thermosynechococcus elongatus
ASVVPQEGQQVTRKHYPNYKVTVLNDDFNTFQHVVACLKKYIPNMISDRAWELTNQVHYGGRAIVWVGPQEQAELYHEQLLRAGLTMAPLEPEGS

SEQ ID NO: 789 - protein, 95 aa, Thermosynechococcus elongatus
ASVVPQEGQQVTRKHYPNYKVIVLNDDFNTFQHVAACLMKYIPNMTSDRAWELTNQVHYVGQAIVWVGPQEQAELYHEQLLRAGLTMAPLEPEGS

SEQ ID NO: 790 - protein, 95 aa, Thermosynechococcus elongatus; identical to SEQ ID NO: 1

SEQ ID NO: 791 - protein, 95 aa, Thermosynechococcus elongatus
ASVVPQEGQQVTRKHYPNYKVIVLNDDFNTFQHVVACLKKYIPNMTSDRAWELTNQVHYEGQAIVWVGPQEQAELYHEQLLRAGLTMAPLEPGGS

SEQ ID NO: 792 - protein, 95 aa, Thermosynechococcus elongatus
ASVVPQEGQQVTRKHYPNYKVIVLNDDFNTFQHVVACLKKYIPNMTSDRAWELTNQVHYVGQAIVWVGPQEQAELYHEQLLRAGLTMAPLEPKGS

SEQ ID NO: 793 - protein, 95 aa, Thermosynechococcus elongatus
ASVVPQEGQQVTRKHYPNYKVIVLNDDFNTFQHVVACLKKYIPNMIYDRAWELTNQVHYGGRAIVWVGPQEQAELYHEQLLRAGLTMAPLEPEGS

SEQ ID NO: 794 - protein, 95 aa, Thermosynechococcus elongatus; identical to SEQ ID NO: 1

SEQ ID NO: 795 - protein, 95 aa, Thermosynechococcus elongatus
ASVVPQEGQQVTRKHYPNYKVIVLNDDFNTFQHVVACLKKYIPNMISDRAWELTKQVHYGGRAIVWVGPQEQAELYHEQLLRAGLTMAPLEPEGS

SEQ ID NO: 796 - protein, 95 aa, Thermosynechococcus elongatus
ASVVPQEGQQVTRKHYPNYKVIVLNDDFNTFQHVVACLKKYIPNMISDRAWELTNQVHYKGQAIVWVGPQEQAELNHEQLLRAGLTMAPLEPGGS

SEQ ID NO: 797 - protein, 95 aa, Thermosynechococcus elongatus; identical to SEQ ID NO: 614

SEQ ID NO: 798 - protein, 95 aa, Thermosynechococcus elongatus; identical to SEQ ID NO: 22

SEQ ID NO: 799 - protein, 95 aa, Thermosynechococcus elongatus; identical to SEQ ID NO: 1

SEQ ID NO: 800 - protein, 95 aa, Thermosynechococcus elongatus
ASVVPQEGQQVTRKHYPNYKVIVLNDDFNTFQHVVACLKKYIPNMISDRAWELTNQVHYGGRAIVWVGPQEQAELDHEQLLRAGLTMAPLEPEGS

SEQ ID NO: 801 - protein, 95 aa, Thermosynechococcus elongatus
ASVVPQEGQQVTRKHYPNYKVIVLNDDFNTFQHVVACLKKYIPNMISDRAWELTNQVHYGGRAIVWVGPQEQAELYHKQLLRAGLTMAPLEPEGS

SEQ ID NO: 802 - protein, 95 aa, Thermosynechococcus elongatus; identical to SEQ ID NO: 1

SEQ ID NO: 803 - protein, 95 aa, Thermosynechococcus elongatus
ASVVPQEGQQVTRKHYPNYKVIVLNDDFNTFQHVVACLKKYIPNMISDRAWELTNQVHYGGRAIVWVGPQEQAELYHEQSLRAGLTMAPLEPEGS

SEQ ID NO: 804 - protein, 95 aa, Thermosynechococcus elongatus
ASVVPQEGQQVTRKHYPNYKVIVLNDDFNTFQHVVACLKKYIPNMISDRAWELTNQVHYGGRAIVWVGPQEQAELYHEQLVRAGLTMAPLEPEGS

SEQ ID NO: 805 - protein, 95 aa, Thermosynechococcus elongatus
ASVVPQEGQQVTRKHYPNYKVIVLNDDFNTFQHVVACLKKYIPNMISDRAWELTNQVHYGGRAIVWVGPQEQAELYHEQLLRAGLTMDPLEPEGS

SEQ ID NO: 806 - protein, 95 aa, Thermosynechococcus elongatus
ASVVPQEGQQVTRKHYPNYKVIVLNDDFNTFQHVVACLKKYIPNMISDRAWELTNQVHYGGRAIVWVGPQEQAELYHEQLLRAGLTMAPPEPEGS

SEQ ID NO: 807 - protein, 95 aa, Thermosynechococcus elongatus
ASVVPQEGQQVTRKHYPNYKVIVLNDDFNTFQHVVACLKKYIPNMISDRAWELTNQVHYGGRAIVWVGPQEQAELYHEQLLRAGLTMAPLKPEGS

SEQ ID NO: 808 - protein, 95 aa, Thermosynechococcus elongatus
ASVVPQEGQQVTRKHYPNYKVIVLNDDFNTFQHVVACLKKYIPNMISDRAWELTNQVHYGGRAIVWVGPQEQAELYHEQLLRAGLTMAPLVPEGS

SEQ ID NO: 809 - protein, 95 aa, Thermosynechococcus elongatus; identical to SEQ ID NO: 1

SEQ ID NO: 810 - protein, 95 aa, Thermosynechococcus elongatus; identical to SEQ ID NO: 1

SEQ ID NO: 811 - protein, 95 aa, Thermosynechococcus elongatus
ASVVPQEGQQVTRKHYPNYKVIVLNDDFNTFQHVVACLKKYIPNMISDRAWELTNQVHYGGRAIVWVGPQEQAELYHGQLLRAGLTMAPLEPEGS

SEQ ID NO: 812 - protein, 95 aa, Thermosynechococcus elongatus
ASVVPQEGQQVTRKHYPNYKVIVLNDDFNTFQHVVACLKKYIPNMISDRAWELTNQVHYGGRAIVWVGPQEQAELYLEQLLRAGLTMAPLEPEGS

SEQ ID NO: 813 - protein, 95 aa, Thermosynechococcus elongatus
ASVVPQEGQQVTRKHYPNYKVIVLNDDFNTFQHVVACLKKYIPNMISDRAWELTNQVHYGGRAIVWVGPQEQSELYHEQLLRAGLTMAPLEPEGS

SEQ ID NO: 814 - protein, 95 aa, Thermosynechococcus elongatus
ASVVPQEGQQVTRKHYPNYKVIVLNDDFNTFQHVVACLKKYIPNMISDRAWELTNQVHYGGRAIVWVGPQERAELYHEQLLRAGLTMAPLEPEGS

SEQ ID NO: 815 - protein, 95 aa, Thermosynechococcus elongatus
ASVVPQEGQQVTRKHYPNYKVIVLNDDFNTFQHVVACLKKYIPNMISDRAWELTNQVHYGGRAIVWVGPQAQAELYHEQLLRAGLTMAPLEPEGS

SEQ ID NO: 816 - protein, 95 aa, Thermosynechococcus elongatus
ASVVPQEGQQVTRKHYPNYKVIVLNDDFNTFQHVVACLKKYIPNMISDRAWELTNQVHYGGRAIVWVGPREQAELYHEQLLRVGLTMAPLEPEGS

SEQ ID NO: 817 - protein, 95 aa, Thermosynechococcus elongatus
ASVVPQEGQQVTRKHYPNYKVIVLNDDFNTFQHVVACLKKYIPNMISDRAWELTNQVHYGGRAIVWVGSQEQAELYHEQLLRAGLTMAPLEPEGS

SEQ ID NO: 818 - protein, 95 aa, Thermosynechococcus elongatus; identical to SEQ ID NO: 240

SEQ ID NO: 819 - protein, 95 aa, Thermosynechococcus elongatus; identical to SEQ ID NO: 1

SEQ ID NO: 820 - protein, 61 aa, Thermosynechococcus elongatus
ASVVPQEGQQVTRKHYPNYKVIVLNDDFNTFQHVVACLKKYIPNMISDRAWELTNQVHYGG

SEQ ID NO: 821 - protein, 95 aa, Thermosynechococcus elongatus; identical to SEQ ID NO: 1

SEQ ID NO: 822 - protein, 95 aa, Thermosynechococcus elongatus
ASVVPQEGQQVTRKHYPNYKVIVLNDDFNTFQHVVACLKKYIPNMISDRAWELTNQVHYVGLAIVWVGPQEQAELYHEQLLRAGLTMAPLEPEGS

SEQ ID NO: 823 - protein, 95 aa, Thermosynechococcus elongatus
ASVVPQEGQQVTRKHYPNYKVIVLNDDFNTFQHVVACLKKYIPNMISDRAWELTNQVLYGGRAIVWVGPQEQAELYHEQLLRAGLTMAPLEPEGS

SEQ ID NO: 824 - protein, 55 aa, Thermosynechococcus elongatus
ASVVPQEGQQVTRKHYPNYKVIVLNDDFNTFQHVVACLKKYIPNMISDRAWELTN

SEQ ID NO: 825 - protein, 95 aa, Thermosynechococcus elongatus
ASVVPQEGQQVTRKHYPNYKVIVLNDDFNTFQHVVACLKKYIPNMIFDRAWELTNQVHYGGRAIVWVGPQEQAELYHEQLLRAGLTMAPLEPEGS

SEQ ID NO: 826 - protein, 95 aa, Thermosynechococcus elongatus
ASVVPQEGQQVTRKHYPNYKVIVLNDDFNTFQHVVACLKKYIPNIISDRAWELTNQVHYGGRAIVWVGPQEQAELYHEQLLRAGLTMAPLEPEGS

SEQ ID NO: 827 - protein, 95 aa, Thermosynechococcus elongatus; identical to SEQ ID NO: 50

SEQ ID NO: 828 - protein, 95 aa, Thermosynechococcus elongatus
ASVVPQEGQQVTRKHYPNYKVIVLNDDFNTFQHVVACLMKYIPNMTSDRAWELTNQVHYEGQAIVRVGPQEQAELYHKQLLRAGLTMAPLEPEGS

SEQ ID NO: 829 - protein, 95 aa, Thermosynechococcus elongatus
ASVVPQEGQQVTRKHYPNYKVIVLNDDFNTFQHVVACFKKYIPNMISDRAWELTNQVHYGGRAIVWVGPQEQAELYHEQLLRAGLTMAPLEPEGS

SEQ ID NO: 830 - protein, 95 aa, Thermosynechococcus elongatus; identical to SEQ ID NO: 1

SEQ ID NO: 831 - protein, 95 aa, Thermosynechococcus elongatus
ASVVPQEGQQVTRKHYPNYKVIVLNDDFNTFRHVAACLMKYIPNMTSDRAWELTNQVHYKGRAIVWVGPQEQAELYHEQLLRAGLTMAPLEPEGS

SEQ ID NO: 832 - protein, 95 aa, Thermosynechococcus elongatus; identical to SEQ ID NO: 86

SEQ ID NO: 833 - protein, 95 aa, Thermosynechococcus elongatus
ASVVPQEGQQVTRKHYPNYKVIVLNDDFYTFQHVVACLKKYIPNMISDRAWELTNQVHYGGRAIVWVGPQEQAELYHEQLLRAGLTMAPLEPEGS

SEQ ID NO: 834 - protein, 95 aa, Thermosynechococcus elongatus
ASVVPQEGQQVTRKHYPNYKVIVLNYDFNTFQHVVACLKKYIPNMISDRAWELTNQVHYGGRAIVWVGPQEQAELYHEQLLRAGLTMAPLEPEGS

SEQ ID NO: 835 - protein, 95 aa, Thermosynechococcus elongatus
ASVVPQEGQQVTRKHYPNYKVIVFNDDFNTFQHVVACLKKYIPNMISDRAWELTNQVHYGGRAIVWVGPQEQAELYHEQLLRAGLTMAPLEPEGS

SEQ ID NO: 836 - protein, 95 aa, Thermosynechococcus elongatus
ASVVPQEGQQVTRKHYPNYKVLVLNDDFNTFQHVVACLKKYIPNMISDRAWELTNQVHYGGRAIVWVGPQEQAELYHEQLLRAGLTMAPLEPEGS

SEQ ID NO: 837 - protein, 95 aa, Thermosynechococcus elongatus
ASVVPQEGQQVTRKHYPNYMVIVLNDDFNTFQHVVACLKKYIPNMISDRAWELTNQVHYGGRAIVWVGPQEQAELYHEQLLRAGLTMAPLEPEGS

SEQ ID NO: 838 - protein, 95 aa, Thermosynechococcus elongatus
ASVVPQEGQQVTSKHYPNYKVIVLNDDFNTFRHVAACLMKYIPNMTSDRAWELTNQVHYEGQAIVWVGPQEQAELYHEQLLRAGLTMAPLEPEGS

SEQ ID NO: 839 - protein, 95 aa, Thermosynechococcus elongatus
ASVVPQEGQQVARKHYPNYKVIVLNDDFNTFQHVVACLKKYIPNMISDRAWELTNQVHYGGRAIVWVGPQEQAELYHEQLLRAGLTMAPLEPEGS

SEQ ID NO: 840 - protein, 6 aa, Thermosynechococcus elongatus
ASVVPQ

SEQ ID NO: 841 - protein, 95 aa, Thermosynechococcus elongatus; identical to SEQ ID NO: 1

SEQ ID NO: 842 - protein, 95 aa, Thermosynechococcus elongatus
ASVVLQEGQQVTRKHYPNYKVIVLNDDFNTFQHVVACLKKYIPNMISDRAWELTNQVHYGGRAIVWVGPQEQAELYHEQLLRAGLTMAPLEPEGS

SEQ ID NO: 843 - protein, 95 aa, Thermosynechococcus elongatus
ASVLPQEGQQVTRKHYPNYKVIVLNDDFNTFQHVVACLKKYIPNMISDRAWELTNQVHYGGRAIVWVGPQEQAELYHEQLLRAGLTMAPLEPEGS

SEQ ID NO: 844 - protein, 95 aa, Thermosynechococcus elongatus
ASAVPQERQQDTRKHYPNYKVIVLNDDFNTFRHVAACLMKYIPNMTSDRAWELTNQVHYEGQAIVWVGPQEQAELYHEQLLRAGLTMAPLEPEGS

SEQ ID NO: 845 - protein, 95 aa, Thermosynechococcus elongatus; identical to SEQ ID NO: 3

SEQ ID NO: 846 - protein, 95 aa, Thermosynechococcus elongatus; identical to SEQ ID NO: 7

SEQ ID NO: 847 - protein, 95 aa, Thermosynechococcus elongatus; identical to SEQ ID NO: 1

SEQ ID NO: 848 - protein, 95 aa, Thermosynechococcus elongatus
ASVEPQERQQVTRKHYPNYKVIVLNDDFNTFRHVAACLMKYIPNMTSDRAWELTNQVHYKGQAIVWVGPQEQAELNHEQLLRAGLTMAPLEPEGS

SEQ ID NO: 849 - protein, 95 aa, Thermosynechococcus elongatus
ASVAPQERQQVARKHYPNYKVIVLNDDFNTFRHVAACLMKYIPNMTSDRAWELTNQVHYEGQAIVWVGPQVQAELYHEQLLRAGLTMAPLEPGGS

SEQ ID NO: 850 - protein, 95 aa, Thermosynechococcus elongatus
ASVVQQERQQVARKHYPNYKVIVLNDDFNTFRHVAACLMKYIPNMTSDRAWELTNQVHYEGQAIVWVGPQVQAELYHEQLLRAGLTMAPLEPEGS

SEQ ID NO: 851 - protein, 95 aa, Thermosynechococcus elongatus
ASVVQQERQQVARKHYPNYKVIVLNDDFNTFRHVAACLMKYIPNMTSDRAWELTNQVHYEGQAIVWVGPQVQAELYHEQLLRAGLTMAPLEPGGS

SEQ ID NO: 852 - protein, 95 aa, Thermosynechococcus elongatus
ASVVQQERQQDTRKHYPNYKVIVLNDDFNTFRHVAACLMKYIPNKTSDRAWELTNQVHYEGQAIVWVGPQEQAELYHEQLLRAGLTMAPLEPEGS

SEQ ID NO: 853 - protein, 95 aa, Thermosynechococcus elongatus; identical to SEQ ID NO: 10

SEQ ID NO: 854 - protein, 95 aa, Thermosynechococcus elongatus; identical to SEQ ID NO: 25

SEQ ID NO: 855 - protein, 95 aa, Thermosynechococcus elongatus
ASVVPQERQQVARKHYPNNKVIVLNDDFNTFRHVAACLMKYIPNMTSDRAWELTNQVHYEGQAIVWVGPQVQAELYHEQLLRAGLTMAPLEPGGS

SEQ ID NO: 856 - protein, 95 aa, Thermosynechococcus elongatus
ASVVPQERQQVARKHYPNYKDIVLNDDFNTFRHVAACLMKYIPNMTSDRAWELTNQVHYEGQAIVWVGPQVQAELYHEQLLRAGLTMAPLEPGGS

SEQ ID NO: 857 - protein, 95 aa, Thermosynechococcus elongatus; identical to SEQ ID NO: 3

SEQ ID NO: 858 - protein, 95 aa, Thermosynechococcus elongatus
ASVVPQERQQVARKHYPNYKVIVSNDDFNTFRHVAACLMKYIPNMTSDRAWELTNQVHYEGQAIVWVGPQVQAELYHEQLLRAGLTMAPLEPGGS

SEQ ID NO: 859 - protein, 46 aa, Thermosynechococcus elongatus
ASVVPQERQQVARKHYPNYKVIVLNDDFNTFRRCCMLDEVHPKHDF

SEQ ID NO: 860 - protein, 95 aa, Thermosynechococcus elongatus
ASVVPQERQQVARKHYPNYKVIVLNDDFNTFQHVVACLKKYIPNKTSDRAWELTNQVHYEGQAIVWVGPQEQAELYHEQLLRAGLTMAPLEPEGS

SEQ ID NO: 861 - protein, 95 aa, Thermosynechococcus elongatus
ASVVPQERQQVARKHYPNYKVIVLNDDFNTFQHVVACLKKYIPNMISDRAWELTNQVHYGGQAIVWVGPQEQAELYHEQLLRAGLTMAPLEPEGS

SEQ ID NO: 862 - protein, 95 aa, Thermosynechococcus elongatus
ASVVPQERQQVARKHYPNYKVIVLNDDFNTFQHVVACLMKYIPNMTSDRAWELTNQVHYKGQAIVWVGPQEQAELNHEQLLRAGLTMAPLEPEGS

SEQ ID NO: 863 - protein, 95 aa, Thermosynechococcus elongatus
ASVVPQERQQVARKHYPNYKVIVLNDDFNTFQHVVVCLKKYIPNMISDRAWELTNQVHYGGRAIVWVGPQEQAELYHEQLLRAGLTMAPLEPEGS

SEQ ID NO: 864 - protein, 95 aa, Thermosynechococcus elongatus; identical to SEQ ID NO: 3

SEQ ID NO: 865 - protein, 95 aa, Thermosynechococcus elongatus; identical to SEQ ID NO: 3

SEQ ID NO: 866 - protein, 95 aa, Thermosynechococcus elongatus
ASVVPQERQQVARKHYPNYKVIVLNDDFNTFRHVATCLMKYIPNMTSDRAWELTNQVHYEGQAIVWVGPQVQAELYHEQLLRAGLTMAPLEPGGS

SEQ ID NO: 867 - protein, 95 aa, Thermosynechococcus elongatus
ASVVPQERQQVARKHYPNYKVIVLNDDFNTFRHVAACWMKYIPNMTSDRAWELTNQVHYEGQAIVWVGPQVQAELYHEQLLRAGLTMAPLEPGGS

SEQ ID NO: 868 - protein, 95 aa, Thermosynechococcus elongatus
ASVVPQERQQVARKHYPNYKVIVLNDDFNTFRHVAACLKKYIPNMTSDRAWELTNQVHYEGQAIVWVGPQEQAELYHEQLLRAGLTMAPLEPEGS

SEQ ID NO: 869 - protein, 95 aa, Thermosynechococcus elongatus
ASVVPQERQQVARKHYPNYKVIVLNDDFNTFRHVAACLKKYIPNMISDRAWELTNQVHYEGQAIVWVGPQEQAELYHEQLLRAGLTMAPLEPEGS

SEQ ID NO: 870 - protein, 95 aa, Thermosynechococcus elongatus
ASVVPQERQQVARKHYPNYKVIVLNDDFNTFRHVAACLKKYIPNMISDRAWELTNQVHYGGRAIVWVGPQEQAELYHEQLLRAGLTMAPLEPGGS

SEQ ID NO: 871 - protein, 95 aa, Thermosynechococcus elongatus
ASVVPQERQQVARKHYPNYKVIVLNDDFNTFRHVAACLMKYIPNKTSDRAWELTNQVHYEGQAIVWVGPQVQAELYHEQLLRAGLTMAPLEPEGS

SEQ ID NO: 872 - protein, 95 aa, Thermosynechococcus elongatus
ASVVPQERQQVARKHYPNYKVIVLNDDFNTFRHVAACLMKYIPNMTSDRAWESTNQVHYEGQAIVWVGPQVQAELYHEQLLRAGLTMAPLEPGGS

SEQ ID NO: 873 - protein, 95 aa, Thermosynechococcus elongatus
ASVVPQERQQVARKHYPNYKVIVLNDDFNTFRHVAACLMKYIPNMTSDRAWELTNKVHYEGQAIVWVGPQVQAELYHEQLLRAGLTMAPLEPGGS

SEQ ID NO: 874 - protein, 58 aa, Thermosynechococcus elongatus
ASVVPQERQQVARKHYPNYKVIVLNDDFNTFRHVAACLMKYIPNMTSDRAWELTNQVH

SEQ ID NO: 875 - protein, 95 aa, Thermosynechococcus elongatus; identical to SEQ ID NO: 3

SEQ ID NO: 876 - protein, 95 aa, Thermosynechococcus elongatus
ASVVPQERQQVARKHYPNYKVIVLNDDFNTFRHVAACLMKYIPNMTSDRAWELTNQVHYEGQAIDWVGPQVQAELYHEQLLRAGLTMAPLEPGGS

SEQ ID NO: 877 - protein, 95 aa, Thermosynechococcus elongatus
ASVVPQERQQVARKHYPNYKVIVLNDDFNTFRHVAACLMKYIPNMTSDRAWELTNQVHYEGQAIVRVGPQEQAELYHEQLLRAGLTMAPLEPEGS

SEQ ID NO: 878 - protein, 95 aa, Thermosynechococcus elongatus; identical to SEQ ID NO: 3

SEQ ID NO: 879 - protein, 95 aa, Thermosynechococcus elongatus
ASVVPQERQQVARKHYPNYKVIVLNDDFNTFRHVAACLMKYIPNMTSDRAWELTNQVHYEGQAIVWVGPQEQAELYHEQWLRAGLTMAPLEPEGS

SEQ ID NO: 880 - protein, 95 aa, Thermosynechococcus elongatus
ASVVPQERQQVARKHYPNYKVIVLNDDFNTFRHVAACLMKYIPNMTSDRAWELTNQVHYEGQAIVWVGPQEQAELYHEQLLRAGLTRAPLEPEGS

SEQ ID NO: 881 - protein, 95 aa, Thermosynechococcus elongatus
ASVVPQERQQVARKHYPNYKVIVLNDDFNTFRHVAACLMKYIPNMTSDRAWELTNQVHYEGQAIVWVGPQEQAELYHEQLLRAGLTMASLEPEGS

SEQ ID NO: 882 - protein, 95 aa, Thermosynechococcus elongatus
ASVVPQERQQVARKHYPNYKVIVLNDDFNTFRHVAACLMKYIPNMTSDRAWELTNQVHYEGQAIVWVGPQERAELYHEQLLRAGLTMAPLEPEGS

SEQ ID NO: 883 - protein, 95 aa, Thermosynechococcus elongatus
ASVVPQERQQVARKHYPNYKVIVLNDDFNTFRHVAACLMKYIPNMTSDRAWELTNQVHYEGQAIVWVGPQVQAELYHEQWLRAGLTMAPLEPGGS

SEQ ID NO: 884 - protein, 95 aa, Thermosynechococcus elongatus
ASVVPQERQQVARKHYPNYKVIVLNDDFNTFRHVAACLMKYIPNMTSDRAWELTNQVHYEGQAIVWVGPQVQAELYHEQFLRAGLTMAPLEPGGS

SEQ ID NO: 885 - protein, 95 aa, Thermosynechococcus elongatus
ASVVPQERQQVARKHYPNYKVIVLNDDFNTFRHVAACLMKYIPNMTSDRAWELTNQVHYEGQAIVWVGPQVQAELYHEQLVRAGLTMAPLEPGGS

SEQ ID NO: 886 - protein, 95 aa, Thermosynechococcus elongatus
ASVVPQERQQVARKHYPNYKVIVLNDDFNTFRHVAACLMKYIPNMTSDRAWELTNQVHYEGQAIVWVGPQVQAELYHEQLLRAGLTMAPFEPGGS

SEQ ID NO: 887 - protein, 95 aa, Thermosynechococcus elongatus
ASVVPQERQQVARKHYPNYKVIVLNDDFNTFRHVAACLMKYIPNMTSDRAWELTNQVHYEGQAIVWVGPQVQAELYHEQLLRAGLTLAPLEPEGS

SEQ ID NO: 888 - protein, 95 aa, Thermosynechococcus elongatus; identical to SEQ ID NO: 670

SEQ ID NO: 889 - protein, 95 aa, Thermosynechococcus elongatus
ASVVPQERQQVARKHYPNYKVIVLNDDFNTFRHVAACLMKYIPNMTSDRAWELTNQVHYEGQAIVWVGPQVQAELYHEQLLRAGLAMAPLEPGGS

SEQ ID NO: 890 - protein, 95 aa, Thermosynechococcus elongatus
ASVVPQERQQVARKHYPNYKVIVLNDDFNTFRHVAACLMKYIPNMTSDRAWELTNQVHYDGQAIVWVGPQVQAELYHEQLLRAGLTMAPLEPGGS

SEQ ID NO: 891 - protein, 95 aa, Thermosynechococcus elongatus
ASVVPQERQQVARKHYPNYKVIVLNDDFNTFRHVAACLMKYIPNMTSDRAWELTNQVHYAGQAIVWVGPQVQAELYHEQLLRAGLTMAPLEPGGS

SEQ ID NO: 892 - protein, 95 aa, Thermosynechococcus elongatus
ASVVPQERQQVARKHYPNYKVIVLNDDFNTFRHVAACLMKYIPNMTSDRAWELTNQVHYVGQAIVWVGPQVQAELYHEQLLRAGLTMAPLEPGGS

SEQ ID NO: 893 - protein, 95 aa, Thermosynechococcus elongatus
ASVVPQERQQVARKHYPNYKVIVLNDDFNTFRHVAACLMKYIPNMTSDRAWDLTNQVHYEGQAIVWVGPQVQAELYHEQLLRAGLTMAPLEPGGS

SEQ ID NO: 894 - protein, 51 aa, Thermosynechococcus elongatus
ASVVPQERQQVARKHYPNYKVIVLNDDFNTFRHVAACLMKYIPNMTSDRAW

SEQ ID NO: 895 - protein, 95 aa, Thermosynechococcus elongatus
ASVVPQERQQVARKHYPNYKVIVLNDDFNTFRHVAACLMKYIPNMTSDRACELTNQVHYEGQAIVWVGPQVQAELYHEQLLRAGLTMAPLEPGGS

SEQ ID NO: 896 - protein, 95 aa, Thermosynechococcus elongatus; identical to SEQ ID NO: 3

SEQ ID NO: 897 - protein, 95 aa, Thermosynechococcus elongatus
ASVVPQERQQVARKHYPNYKVIVLNDDFNTFRHVAACLMKYIPNMISDRAWELTNQVHYGGRAIVWVGPQEQAELYHEQLLRAGLTMAPLEPGGS

SEQ ID NO: 898 - protein, 95 aa, Thermosynechococcus elongatus
ASVVPQERQQVARKHYPNYKVIVLNDDFNTFRHVAACLMKYIPNMTSDRAWELTNQVHYKGQAIVWVGPQEQAELYHEQLLRAGLTMAPLEPGGS

SEQ ID NO: 899 - protein, 95 aa, Thermosynechococcus elongatus
ASVVPQERQQVARKHYPNYKVIVLNDDFNTFRHVAACLMKYIPNMTSDRAWELTNQVHYKGQAIVWVGPQVQAELYHEQLLRAGLTMAPLEPGGS

SEQ ID NO: 900 - protein, 95 aa, Thermosynechococcus elongatus; identical to SEQ ID NO: 284

SEQ ID NO: 901 - protein, 95 aa, Thermosynechococcus elongatus; identical to SEQ ID NO: 899

SEQ ID NO: 902 - protein, 95 aa, Thermosynechococcus elongatus
ASVVPQERQQVARKHYPNYKVIVLNDDFNTFRHVAACLMKYIPDMTSDRAWELTNQVHYEGQAIVWVGPQVQAELYHEQLLRAGLTMAPSEPGGS

SEQ ID NO: 903 - protein, 95 aa, Thermosynechococcus elongatus
ASVVPQERQQVARKHYPNYKVIVLNDDFNTFRHVAACLMKCIPNMTSDRAWELTNQVHYEGQAIVWVGPQVQAELYHEQLLRAGLTMAPLEPGGS

SEQ ID NO: 904 - protein, 95 aa, Thermosynechococcus elongatus
ASVVPQERQQVARKHYPNYKVIVLNDDFNTFRHVAVCLMKYIPNMTSDRAWELTNQVHYEGQAIVWVGPQVQAELYHEQLLRAGLTMAPLEPGGS

SEQ ID NO: 905 - protein, 95 aa, Thermosynechococcus elongatus
ASVVPQERQQVARKHYPNYKVIVLNDDFNTFRRVAACLMKYIPNMTSDRAWELTNQVHYEGQAIVWVGPQVQAELYHEQLLRAGLTMAPLEPGGS

SEQ ID NO: 906 - protein, 95 aa, Thermosynechococcus elongatus; identical to SEQ ID NO: 3

SEQ ID NO: 907 - protein, 95 aa, Thermosynechococcus elongatus
ASVVPQERQQVARKHYPNYKVIVLNDDFITFRHVAACLMKYIPNMTSDRAWELTNQVHYEGQAIVWVGPQVQAELYHEQLLRAGLTMAPLEPGGS

SEQ ID NO: 908 - protein, 95 aa, Thermosynechococcus elongatus; identical to SEQ ID NO: 3

SEQ ID NO: 909 - protein, 95 aa, Thermosynechococcus elongatus
ASVVPQERQQVARKHYPNYKVIVLNDYFNTFRHVAACLMKYIPNMTSDRAWELTNQVHYEGQAIVWVGPQVQAELYHEQLLRAGLTMAPLEPGGS

SEQ ID NO: 910 - protein, 95 aa, Thermosynechococcus elongatus
ASVVPQERQQVARKHYPNYKVIVLSDDFNTFRHVAACLMKYIPNMTSDRAWELTNQVHYEGQAIVWVGPQVQAELYHEQLLRAGLTMAPLEPGGS

SEQ ID NO: 911 - protein, 95 aa, Thermosynechococcus elongatus
ASVVPQERQQVARTHYPNYKVIVLNDDFNTFQHVVACLKKYIPNMISDRAWELTNQVHYGGRAIVWVGPQEQAELYHEQLLRAGLTMAPLEPEGS

SEQ ID NO: 912 - protein, 95 aa, Thermosynechococcus elongatus
ASVVPQERQHVARKHYPNYKVIVLNDDFNTFRHVAACLMKYIPNMTSDRAWELTNQVHYEGQAIVWVGPQVQAELYHEQLLRAGLTMAPLEPGGS

SEQ ID NO: 913 - protein, 95 aa, Thermosynechococcus elongatus
ASVVPQERQQDTRKHNPNYKVIVLNDDFNTFRHVAACLMKYIPNMTSDRAWELTNQVHYEGQAIVWVGPQEQAELYHEQLLRAGLTMAPLEPEGS

SEQ ID NO: 914 - protein, 95 aa, Thermosynechococcus elongatus; identical to SEQ ID NO: 100

SEQ ID NO: 915 - protein, 95 aa, Thermosynechococcus elongatus
ASVVPQERQQDTRKHHPNYKVIVLNDDFNTFRHVAACLMKYIPNMTSDRAWELTNQVHYGGRAIVWVGPQEQAELYHEQLLRAGLTMAPLEPEGS

SEQ ID NO: 916 - protein, 95 aa, Thermosynechococcus elongatus
ASVVPQERQQDTRKHYPNNKVIVLNDDFNTFRHVAACLMKYIPNMTSDRAWELTNQVHYEGQAIVWVGPQEQAELYHEQLLRAGLTMAPLEPEGS

SEQ ID NO: 917 - protein, 95 aa, Thermosynechococcus elongatus; identical to SEQ ID NO: 28

SEQ ID NO: 918 - protein, 95 aa, Thermosynechococcus elongatus
ASVVPQERQQDTRKHYPNYKAIVLNDDFNTFRHVAACLMKYIPNMTSDRAWELTNQVHYEGQAIVWVGPQEQAELYHEQLLRAGLTMAPLEPEGS

SEQ ID NO: 919 - protein, 95 aa, Thermosynechococcus elongatus; identical to SEQ ID NO: 4

SEQ ID NO: 920 - protein, 95 aa, Thermosynechococcus elongatus
ASVVPQERQQDTRKHYPNYKVRVLNDDFNTFRHVAACLMKYIPNKTSDRAWELTNQVHYEGQAIVWVGPQEQAELYHEQLLRAGLTMAPLEPEGS

SEQ ID NO: 921 - protein, 95 aa, Thermosynechococcus elongatus
ASVVPQERQQDTRKHYPNYKVIILNDDFNTFQHVAACLMKYIPNKTSDRAWELTNQVHYEGQAIVWVGPQEQAELYHEQLLRAGLTMAPLEPEGS

SEQ ID NO: 922 - protein, 95 aa, Thermosynechococcus elongatus
ASVVPQERQQDTRKHYPNYKVIILNDDFNTFQHVAACLMKYIPNMTSDRAWELTNQVHYEGQAIVWVGPQVQAELYHEQLLRAGLTMAPLEPEGS

SEQ ID NO: 923 - protein, 95 aa, Thermosynechococcus elongatus
ASVVPQERQQDTRKHYPNYKVIILNDDFNTFQHVAACLMKYIPNMTSDRACELTNQVHYEGQAIVRVGPQEQAELYHKQLLRAGLTMAPLEPEGS

SEQ ID NO: 924 - protein, 95 aa, Thermosynechococcus elongatus; identical to SEQ ID NO: 313

SEQ ID NO: 925 - protein, 95 aa, Thermosynechococcus elongatus
ASVVPQERQQDTRKHYPNYKVIGLNDDFNTFRHVAACLMKYIPNMTSDRAWELTNQVHYEGQAIVWVGPQEQAELYHEQLLRAGLTMAPLEPEGS

SEQ ID NO: 926 - protein, 95 aa, Thermosynechococcus elongatus; identical to SEQ ID NO: 2

SEQ ID NO: 927 - protein, 95 aa, Thermosynechococcus elongatus
ASVVPQERQQDTRKHYPNYKVIVMNDDFNTFRHVAACLMKYIPNMTSDRAWELTNQVHYEGQAIVWVGPQEQAELYHEQLLRAGLTMAPLEPEGS

SEQ ID NO: 928 - protein, 95 aa, Thermosynechococcus elongatus
ASVVPQERQQDTRKHYPNYKVIVLNDDLNTFRHVAACLMKYIPNMTSDRAWELTNQVHYEGQAIVWVGPQEQAELYHEQLLRAGLTMAPLEPEGS

SEQ ID NO: 929 - protein, 95 aa, Thermosynechococcus elongatus
ASVVPQERQQDTRKHYPNYKVIVLNDDFNTFQHVAACLMKYIPNMTSDRAWELTNQVHYKGQAIVWVGPQEQAELNHEQLLRAGLTMAPLEPEGS

SEQ ID NO: 930 - protein, 36 aa, Thermosynechococcus elongatus
ASVVPQERQQDTRKHYPNYKVIVLNDDFNTFQHVVA

SEQ ID NO: 931 - protein, 95 aa, Thermosynechococcus elongatus; identical to SEQ ID NO: 690

SEQ ID NO: 932 - protein, 95 aa, Thermosynechococcus elongatus
ASVVPQERQQDTRKHYPNYKVIVLNDDFNTFQHVVACLKKYIPNMISDRAWELTNQVHYGGRAIVWVGPQEQAELYHEQLLRAGLTRAPLEPEGS

SEQ ID NO: 933 - protein, 95 aa, Thermosynechococcus elongatus
ASVVPQERQQDTRKHYPNYKVIVLNDDFNTFQHVVACLKKYIPNMISDRAWELTNQVHYGGRAIVCVGPQEQAELYHEQLLRAGLTMAPLEPEGS

SEQ ID NO: 934 - protein, 95 aa, Thermosynechococcus elongatus
ASVVPQERQQDTRKHYPNYKVIVLNDDFNTFQHVVACLKKYIPNMTSDRAWELTNQVHYKGQAIVWVGPQEQAELNHEQLLRAGLTMAPLEPEGS

SEQ ID NO: 935 - protein, 95 aa, Thermosynechococcus elongatus
ASVVPQERQQDTRKHYPNYKVIVLNDDFNTFQHVVVCLKKYIPNMISDRAWELTNQVHYGGRAIVWVGPQEQAELYHEQLLRAGLTMAPLEPEGS

SEQ ID NO: 936 - protein, 95 aa, Thermosynechococcus elongatus; identical to SEQ ID NO: 2

SEQ ID NO: 937 - protein, 95 aa, Thermosynechococcus elongatus; identical to SEQ ID NO: 463

SEQ ID NO: 938 - protein, 95 aa, Thermosynechococcus elongatus; identical to SEQ ID NO: 4

SEQ ID NO: 939 - protein, 36 aa, Thermosynechococcus elongatus; identical to SEQ ID NO: 556

SEQ ID NO: 940 - protein, 95 aa, Thermosynechococcus elongatus; identical to SEQ ID NO: 2

SEQ ID NO: 941 - protein, 95 aa, Thermosynechococcus elongatus
ASVVPQERQQDTRKHYPNYKVIVLNDDFNTFRHVAACSMKYIPNMTSDRAWELTNQVHYEGQAIVWVGPQEQAELYHEQLLRAGLTMAPLEPEGS

SEQ ID NO: 942 - protein, 95 aa, Thermosynechococcus elongatus
ASVVPQERQQDTRKHYPNYKVIVLNDDFNTFRHVAACWMKYIPNMTSDRAWELTNQVHYEGQAIVWVGPQEQAELYHEQLLRAGLTMAPLEPEGS

SEQ ID NO: 943 - protein, 95 aa, Thermosynechococcus elongatus; identical to SEQ ID NO: 743

SEQ ID NO: 944 - protein, 95 aa, Thermosynechococcus elongatus
ASVVPQERQQDTRKHYPNYKVIVLNDDFNTFRHVAACLMKHIPNMTSDRAWELTNQVHYEGQAIVWVGPQEQAELYHEQLLRAGLTMAPLEPEGS

SEQ ID NO: 945 - protein, 95 aa, Thermosynechococcus elongatus; identical to SEQ ID NO: 2

SEQ ID NO: 946 - protein, 95 aa, Thermosynechococcus elongatus
ASVVPQERQQDTRKHYPNYKVIVLNDDFNTFRHVAACLMKYIPKMTSDRAWELTNQVHYEGQAIVWVGPQEQAELYHEQLLRAGLTMAPLEPEGS

SEQ ID NO: 947 - protein, 95 aa, Thermosynechococcus elongatus
ASVVPQERQQDTRKHYPNYKVIVLNDDFNTFRHVAACLMKYIPNKTSDRDWELTNQVHYEGQAIVWVGPQEQAELYHEQLLRAGLTMAPLEPEGS

SEQ ID NO: 948 - protein, 95 aa, Thermosynechococcus elongatus
ASVVPQERQQDTRKHYPNYKVIVLNDDFNTFRHVAACLMKYIPNKTSDRAWELTNKVHYEGQAIVWVGPQEQAELYHEQLLRAGLTMAPLEPEGS

SEQ ID NO: 949 - protein, 95 aa, Thermosynechococcus elongatus; identical to SEQ ID NO: 76

SEQ ID NO: 950 - protein, 95 aa, Thermosynechococcus elongatus
ASVVPQERQQDTRKHYPNYKVIVLNDDFNTFRHVAACLMKYIPNKTSDRAWELTNQVHYKGQAIVWVGPQEQAELNHEQLLRAGLTMAPLEPGGS

SEQ ID NO: 951 - protein, 95 aa, Thermosynechococcus elongatus
ASVVPQERQQDTRKHYPNYKVIVLNDDFNTFRHVAACLMKYIPNKTSDRAWELTNQVHYKGQAIVWVGPQEQAELYHEQLLRAGLTMAPLEPEGS

SEQ ID NO: 952 - protein, 95 aa, Thermosynechococcus elongatus; identical to SEQ ID NO: 4

SEQ ID NO: 953 - protein, 95 aa, Thermosynechococcus elongatus
ASVVPQERQQDTRKHYPNYKVIVLNDDFNTFRHVAACLMKYIPNKTSDRAWELTNQVHYEGQAIVWVGPQEQAELYHEQWLRAGLTMAPLEPEGS

SEQ ID NO: 954 - protein, 95 aa, Thermosynechococcus elongatus
ASVVPQERQQDTRKHYPNYKVIVLNDDFNTFRHVAACLMKYIPNKTSDRAWELTNQVHYEGQAIVWVGPQEQAELYHEQLVRAGLTMAPLEPEGS

SEQ ID NO: 955 - protein, 95 aa, Thermosynechococcus elongatus
ASVVPQERQQDTRKHYPNYKVIVLNDDFNTFRHVAACLMKYIPNKTSDRAWELTNQVHYEGQAIVWVGPQEQAELYHEQLWRAGLTMAPLEPEGS

SEQ ID NO: 956 - protein, 95 aa, Thermosynechococcus elongatus
ASVVPQERQQDTRKHYPNYKVIVLNDDFNTFRHVAACLMKYIPNKTSDRAWELTNQVHYEGQAIVWVGPQEQAELYHEQLLRAGLTMAPSEPEGS

SEQ ID NO: 957 - protein, 95 aa, Thermosynechococcus elongatus
ASVVPQERQQDTRKHYPNYKVIVLNDDFNTFRHVAACLMKYIPNKTSDRAWELTNQVHYEGQAIVWVGPQEQAELYHEQLLRAGLTMAPLEQEGS

SEQ ID NO: 958 - protein, 95 aa, Thermosynechococcus elongatus
ASVVPQERQQDTRKHYPNYKVIVLNDDFNTFRHVAACLMKYIPNKTSDRAWELTNQVHYEGQAIVWVGPQEQAELYHEPLLRAGLTMAPLEPEGS

SEQ ID NO: 959 - protein, 95 aa, Thermosynechococcus elongatus
ASVVPQERQQDTRKHYPNYKVIVLNDDFNTFRHVAACLMKYIPNKTSDRAWELTNQVHYEGQAIVWVGPQEQAVLYHEQLLRAGLTMAPLEPEGS

SEQ ID NO: 960 - protein, 73 aa, Thermosynechococcus elongatus
ASVVPQERQQDTRKHYPNYKVIVLNDDFNTFRHVAACLMKYIPNKTSDRAWELTNQVHYEGQAIVWVGPQEQA

SEQ ID NO: 961 - protein, 69 aa, Thermosynechococcus elongatus
ASVVPQERQQDTRKHYPNYKVIVLNDDFNTFRHVAACLMKYIPNKTSDRAWELTNQVHYEGQAIVWVGP

SEQ ID NO: 962 - protein, 95 aa, Thermosynechococcus elongatus; identical to SEQ ID NO: 4

SEQ ID NO: 963 - protein, 95 aa, Thermosynechococcus elongatus
ASVVPQERQQDTRKHYPNYKVIVLNDDFNTFRHVAACLMKYIPNKTSDRAWELTNQVHYEGQSIVWVGPQEQAELYHEQLLRAGLTMAPLEPEGS

SEQ ID NO: 964 - protein, 95 aa, Thermosynechococcus elongatus
ASVVPQERQQDTRKHYPNYKVIVLNDDFNTFRHVAACLMKYIPNKTSDRAWELTNQVHYDGQAIVWVGPQEQAELYHEQLLRAGLTMAPLEPEGS

SEQ ID NO: 965 - protein, 95 aa, Thermosynechococcus elongatus
ASVVPQERQQDTRKHYPNYKVIVLNDDFNTFRHVAACLMKYIPNKTSDRAWELTNQVHYVGQAIVWVGPQEQAELYHEQLLRAGLTMAPLEPEGS

SEQ ID NO: 966 - protein, 95 aa, Thermosynechococcus elongatus
ASVVPQERQQDTRKHYPNYKVIVLNDDFNTFRHVAACLMKYIPNKTSDRAWELTNQVHYVGQAIVWVGPQERAELYHEQLLRAGLTMAPLEPGGS

SEQ ID NO: 967 - protein, 95 aa, Thermosynechococcus elongatus
ASVVPQERQQDTRKHYPNYKVIVLNDDFNTFRHVAACLMKYIPNKTSDRAWELTNQVHSEGQAIVWVGPQEQAELYHEQLLRAGLTMAPLEPEGS

SEQ ID NO: 968 - protein, 95 aa, Thermosynechococcus elongatus
ASVVPQERQQDTRKHYPNYKVIVLNDDFNTFRHVAACLMKYIPNKTSDRAWELTNQVHFEGQAIVWVGPQEQAELYHEQLLRAGLTMAPLEPEGS

SEQ ID NO: 969 - protein, 95 aa, Thermosynechococcus elongatus
ASVVPQERQQDTRKHYPNYKVIVLNDDFNTFRHVAACLMKYIPNKTSDRAWELTNQVLYEGQAIVWVGPQEQAELYHEQLLRAGLTMAPLEPEGS

SEQ ID NO: 970 - protein, 51 aa, Thermosynechococcus elongatus
ASVVPQERQQDTRKHYPNYKVIVLNDDFNTFRHVAACLMKYIPNKTSDRAW

SEQ ID NO: 971 - protein, 95 aa, Thermosynechococcus elongatus
ASVVPQERQQDTRKHYPNYKVIVLNDDFNTFRHVAACLMKYIPNKTSDRALELTNQVHYEGQAIVWVGPQEQAELYHEQLLRAGLTMAPLEPEGS

SEQ ID NO: 972 - protein, 95 aa, Thermosynechococcus elongatus
ASVVPQERQQDTRKHYPNYKVIVLNDDFNTFRHVAACLMKYIPNKTSGRAWELTNQVHYEGQAIVWVGPQEQAELYHEQLLRAGLTMAPLEPEGS

SEQ ID NO: 973 - protein, 95 aa, Thermosynechococcus elongatus; identical to SEQ ID NO: 7

SEQ ID NO: 974 - protein, 95 aa, Thermosynechococcus elongatus
ASVVPQERQQDTRKHYPNYKVIVLNDDFNTFRHVAACLMKYIPNMTYDRAWELTNQVHYEGQAIVWVGPQEQAELYHEQLLRAGLTMAPLEPEGS

SEQ ID NO: 975 - protein, 95 aa, Thermosynechococcus elongatus
ASVVPQERQQDTRKHYPNYKVIVLNDDFNTFRHVAACLMKYIPNMTSERAWELTNQVHYEGQAIVWVGPQEQAELYHEQLLRAGLTMAPLEPEGS

SEQ ID NO: 976 - protein, 95 aa, Thermosynechococcus elongatus; identical to SEQ ID NO: 2

SEQ ID NO: 977 - protein, 95 aa, Thermosynechococcus elongatus; identical to SEQ ID NO: 18

SEQ ID NO: 978 - protein, 95 aa, Thermosynechococcus elongatus; identical to SEQ ID NO: 189

SEQ ID NO: 979 - protein, 95 aa, Thermosynechococcus elongatus; identical to SEQ ID NO: 146

SEQ ID NO: 980 - protein, 95 aa, Thermosynechococcus elongatus
ASVVPQERQQDTRKHYPNYKVIVLNDDFNTFRHVAACLMKYIPNMTSDRAWELTNQVHYEGQAIVWVGPQEQAKLYHEQLLRAGLTMAPLEPEGS

SEQ ID NO: 981 - protein, 95 aa, Thermosynechococcus elongatus
ASVVPQERQQDTRKHYPNYKVIVLNDDFNTFRHVAACLMKYIPNMTSDRAWELTNQVHYEGQAIVWVGPQEQAESYHEQLLRAGLTMAPLEPEGS

SEQ ID NO: 982 - protein, 95 aa, Thermosynechococcus elongatus
ASVVPQERQQDTRKHYPNYKVIVLNDDFNTFRHVAACLMKYIPNMTSDRAWELTNQVHYEGQAIVWVGPQEQAELYHEQLSRAGLTMAPLEPEGS

SEQ ID NO: 983 - protein, 95 aa, Thermosynechococcus elongatus
ASVVPQERQQDTRKHYPNYKVIVLNDDFNTFRHVAACLMKYIPNMTSDRAWELTNQVHYEGQAIVWVGPQEQAELYHEQLLRDGLTMAPLEPEGS

SEQ ID NO: 984 - protein, 95 aa, Thermosynechococcus elongatus; identical to SEQ ID NO: 129

SEQ ID NO: 985 - protein, 95 aa, Thermosynechococcus elongatus
ASVVPQERQQDTRKHYPNYKVIVLNDDFNTFRHVAACLMKYIPNMTSDRAWELTNQVHYEGQAIVWVGPQEQAELYHEQLLRAGLTRAPLEPGGS

SEQ ID NO: 986 - protein, 95 aa, Thermosynechococcus elongatus; identical to SEQ ID NO: 346

SEQ ID NO: 987 - protein, 95 aa, Thermosynechococcus elongatus
ASVVPQERQQDTRKHYPNYKVIVLNDDFNTFRHVAACLMKYIPNMTSDRAWELTNQVHYEGQAIVWVGPQEQAELYHEQLLRAGLTMDPLEPEGS

SEQ ID NO: 988 - protein, 95 aa, Thermosynechococcus elongatus
ASVVPQERQQDTRKHYPNYKVIVLNDDFNTFRHVAACLMKYIPNMTSDRAWELTNQVHYEGQAIVWVGPQEQAELYHEQLLRAGLTMAPLEQEGS

SEQ ID NO: 989 - protein, 95 aa, Thermosynechococcus elongatus
ASVVPQERQQDTRKHYPNYKVIVLNDDFNTFRHVAACLMKYIPNMTSDRAWELTNQVHYEGQAIVWVGPQEQAELYHEQLLRAGLTMAPLEPDGS

SEQ ID NO: 990 - protein, 95 aa, Thermosynechococcus elongatus
ASVVPQERQQDTRKHYPNYKVIVLNDDFNTFRHVAACLMKYIPNMTSDRAWELTNQVHYEGQAIVWVGPQEQAELYHEQLLRAGLTMAPLEPVGS

SEQ ID NO: 991 - protein, 95 aa, Thermosynechococcus elongatus
ASVVPQERQQDTRKHYPNYKVIVLNDDFNTFRHVAACLMKYIPNMTSDRAWELTNQVHYEGQAIVWVGPQEQAELYHEQLLRAGLTMAPLEREGS

SEQ ID NO: 992 - protein, 95 aa, Thermosynechococcus elongatus
ASVVPQERQQDTRKHYPNYKVIVLNDDFNTFRHVAACLMKYIPNMTSDRAWELTNQVHYEGQAIVWVGPQEQAELYHEQLLRAGLTVAPLEPEGS

SEQ ID NO: 993 - protein, 95 aa, Thermosynechococcus elongatus
ASVVPQERQQDTRKHYPNYKVIVLNDDFNTFRHVAACLMKYIPNMTSDRAWELTNQVHYEGQAIVWVGPQEQAELYHEQLLRAGLIMAPLEPEGS

SEQ ID NO: 994 - protein, 95 aa, Thermosynechococcus elongatus
ASVVPQERQQDTRKHYPNYKVIVLNDDFNTFRHVAACLMKYIPNMTSDRAWELTNQVHYEGQAIVWVGPQEQAELYHEQLLGAGLTMAPLEPEGS

SEQ ID NO: 995 - protein, 95 aa, Thermosynechococcus elongatus; identical to SEQ ID NO: 167

SEQ ID NO: 996 - protein, 95 aa, Thermosynechococcus elongatus
ASVVPQERQQDTRKHYPNYKVIVLNDDFNTFRHVAACLMKYIPNMTSDRAWELTNQVHYEGQAIVWVGPQEQAELYHAQLLRAGLTMAPLEPEGS

SEQ ID NO: 997 - protein, 95 aa, Thermosynechococcus elongatus
ASVVPQERQQDTRKHYPNYKVIVLNDDFNTFRHVAACLMKYIPNMTSDRAWELTNQVHYEGQAIVWVGPQEQAELYHGQLLRAGLTMAPLEPEGS

SEQ ID NO: 998 - protein, 95 aa, Thermosynechococcus elongatus
ASVVPQERQQDTRKHYPNYKVIVLNDDFNTFRHVAACLMKYIPNMTSDRAWELTNQVHYEGQAIVWVGPQEQAGLYHEQLLRAGLTMAPLEPEGS

SEQ ID NO: 999 - protein, 95 aa, Thermosynechococcus elongatus; identical to SEQ ID NO: 2

SEQ ID NO: 1000 - protein, 95 aa, Thermosynechococcus elongatus
ASVVPQERQQDTRKHYPNYKVIVLNDDFNTFRHVAACLMKYIPNMTSDRAWELTNQVHYEGQAIVWVGPQVQAELYHEQLLRTGLTMAPLEPEGS

SEQ ID NO: 1001 - protein, 95 aa, Thermosynechococcus elongatus
ASVVPQERQQDTRKHYPNYKVIVLNDDFNTFRHVAACLMKYIPNMTSDRAWELTNQVHYEGQAIVWVGPQVQAELYHEHLLRAGLTMAPLEPGGS

SEQ ID NO: 1002 - protein, 95 aa, Thermosynechococcus elongatus
ASVVPQERQQDTRKHYPNYKVIVLNDDFNTFRHVAACLMKYIPNMTSDRAWELTNQVHYEGQAIVWVGPREQAELYHEQLLRAGLTMAPLEPEGS

SEQ ID NO: 1003 - protein, 95 aa, Thermosynechococcus elongatus; identical to SEQ ID NO: 113

SEQ ID NO: 1004 - protein, 95 aa, Thermosynechococcus elongatus; identical to SEQ ID NO: 2

SEQ ID NO: 1005 - protein, 95 aa, Thermosynechococcus elongatus; identical to SEQ ID NO: 2

SEQ ID NO: 1006 - protein, 95 aa, Thermosynechococcus elongatus; identical to SEQ ID NO: 2

SEQ ID NO: 1007 - protein, 95 aa, Thermosynechococcus elongatus
ASVVPQERQQDTRKHYPNYKVIVLNDDFNTFRHVAACLMKYIPNMTSDRAWELTNQVHYEGQSIVWVGPQEQAELYHEQLLRAGLTMAPLEPEGS

SEQ ID NO: 1008 - protein, 61 aa, Thermosynechococcus elongatus
ASVVPQERQQDTRKHYPNYKVIVLNDDFNTFRHVAACLMKYIPNMTSDRAWELTNQVHYEG

SEQ ID NO: 1009 - protein, 95 aa, Thermosynechococcus elongatus
ASVVPQERQQDTRKHYPNYKVIVLNDDFNTFRHVAACLMKYIPNMTSDRAWELTNQVHYEVQAIVWVGPQEQAELYHEQLLRAGLTMAPLEPEGS

SEQ ID NO: 1010 - protein, 95 aa, Thermosynechococcus elongatus; identical to SEQ ID NO: 294

SEQ ID NO: 1011 - protein, 95 aa, Thermosynechococcus elongatus
ASVVPQERQQDTRKHYPNYKVIVLNDDFNTFRHVAACLMKYIPNMTSDRAWELTNQVHYGGRAIVWVGPQEQAELYHEQLLRAGLTRAPLEPEGS

SEQ ID NO: 1012 - protein, 95 aa, Thermosynechococcus elongatus
ASVVPQERQQDTRKHYPNYKVIVLNDDFNTFRHVAACLMKYIPNMTSDRAWELTNQVHYGGRAIVWVGPQVQAELYHEQLLRAGLTMAPLEPGGS

SEQ ID NO: 1013 - protein, 95 aa, Thermosynechococcus elongatus
ASVVPQERQQDTRKHYPNYKVIVLNDDFNTFRHVAACLMKYIPNMTSDRAWELTNQVHFEGQAIVWVGPQEQAELYHEQLLRAGLTMAPLEPEGS

SEQ ID NO: 1014 - protein, 95 aa, Thermosynechococcus elongatus
ASVVPQERQQDTRKHYPNYKVIVLNDDFNTFRHVAACLMKYIPNMTSDRAWELTNQVYYEGQAIVWVGPQEQAELYHEQLLRAGLTMAPLEPEGS

SEQ ID NO: 1015 - protein, 95 aa, Thermosynechococcus elongatus
ASVVPQERQQDTRKHYPNYKVIVLNDDFNTFRHVAACLMKYIPNMTSDRAWELTNQFHYEGQAIVWVGPQEQAELYHEQLLRAGLTMAPLEPEGS

SEQ ID NO: 1016 - protein, 95 aa, Thermosynechococcus elongatus
ASVVPQERQQDTRKHYPNYKVIVLNDDFNTFRHVAACLMKYIPNMTSDRAWELTNLVHYEGQAIVWVGPQEQAELYHEQLLRAGLTMAPLEPEGS

SEQ ID NO: 1017 - protein, 95 aa, Thermosynechococcus elongatus
ASVVPQERQQDTRKHYPNYKVIVLNDDFNTFRHVAACLMKYIPNMTSDRAWELINQVHYEGQAIVWVGPQEQAELYHEQLLRAGLTMAPLEPEGS

SEQ ID NO: 1018 - protein, 95 aa, Thermosynechococcus elongatus
ASVVPQERQQDTRKHYPNYKVIVLNDDFNTFRHVAACLMKYIPNMTSDRAWEFTNQVHYEGQAIVWVGPQEQAELYHEQLLRAGLTMAPLEPEGS

SEQ ID NO: 1019 - protein, 95 aa, Thermosynechococcus elongatus; identical to SEQ ID NO: 483

SEQ ID NO: 1020 - protein, 95 aa, Thermosynechococcus elongatus
ASVVPQERQQDTRKHYPNYKVIVLNDDFNTFRHVAACLMKYIPNMTSDRALELTNQVHYEGQAIVWVGPQEQAELYHEQLLRAGLTMAPLEPGGS

SEQ ID NO: 1021 - protein, 95 aa, Thermosynechococcus elongatus
ASVVPQERQQDTRKHYPNYKVIVLNDDFNTFRHVAACLMKYIPNMTSDIAWELTNQVHYEGQAIVWVGPQVQAELYHEQLLRAGLTMAPLEPGGS

SEQ ID NO: 1022 - protein, 95 aa, Thermosynechococcus elongatus; identical to SEQ ID NO: 317

SEQ ID NO: 1023 - protein, 95 aa, Thermosynechococcus elongatus; identical to SEQ ID NO: 146

SEQ ID NO: 1024 - protein, 95 aa, Thermosynechococcus elongatus
ASVVPQERQQDTRKHYPNYKVIVLNDDFNTFRHVAACFMKYIPNMTSDRAWELTNQVHYEGQAIVWVGPQEQAELYHEQLLRAGLTMAPLEPEGS

SEQ ID NO: 1025 - protein, 95 aa, Thermosynechococcus elongatus; identical to SEQ ID NO: 2

SEQ ID NO: 1026 - protein, 95 aa, Thermosynechococcus elongatus
ASVVPQERQQDTRKHYPNYKVIVLNDDFNTFRHVVACLKKYIPNMISDRAWELTNQVHYEGQAIVWVGPQVQAELYHEQLLRAGLTMAPLEPGGS

SEQ ID NO: 1027 - protein, 95 aa, Thermosynechococcus elongatus
ASVVPQERQQDTRKHYPNYKVIVLNDDFNTFRHVVACLKKYIPNMISDRAWELTNQVHYGGRAIVWVGPQEQAELYHEQLLRAGLTMAPLEPGGS

SEQ ID NO: 1028 - protein, 95 aa, Thermosynechococcus elongatus
ASVVPQERQQDTRKHYPNYKVIVLNDDFNTFRHVVACLMKYIPNMTSDRAWELTNQVHYEGQAIVWVGPQEQAELYHEQLLRAGLTMAPLEPEGS

SEQ ID NO: 1029 - protein, 95 aa, Thermosynechococcus elongatus
ASVVPQERQQDTRKHYPNYKVIVLNDDFNTFRHFAACLMKYIPNKTSDRAWELTNQVHYEGQAIVWVGPQEQAELYHEQLLRAGLTMAPLEPEGS

SEQ ID NO: 1030 - protein, 95 aa, Thermosynechococcus elongatus; identical to SEQ ID NO: 4

SEQ ID NO: 1031 - protein, 95 aa, Thermosynechococcus elongatus
ASVVPQERQQDTRKHYPNYKVIVLNDDFYTFRHVAACLMKYIPNMTSDRAWELTNQVHYEGQAIVWVGPQEQAELYHEQLLRAGLTMAPLEPEGS

SEQ ID NO: 1032 - protein, 95 aa, Thermosynechococcus elongatus
ASVVPQERQQDTRKHYPNYKVIVLNDYFNTFRHVAACLMKYIPNKTSDRAWELTNQVHYEGQAIVWVGPQEQAELYHEQLLRAGLTMAPLEPEGS

SEQ ID NO: 1033 - protein, 95 aa, Thermosynechococcus elongatus
ASVVPQERQQDTRKHYPNYKVIVLNYDFNTFRHVAACLMKYIPNMTSDRAWELTNQVHYEGQAIVWVGPQVQAELYHEQLLRAGLTMAPLEPGGS

SEQ ID NO: 1034 - protein, 95 aa, Thermosynechococcus elongatus
ASVVPQERQQDTRKHYPNYKVIVFNDDFNTFRHVAACLMKYIPNKTSDRAWELTNQVHYEGQAIVWVGPQEQAELYHEQLLRAGLTMAPLEPEGS

SEQ ID NO: 1035 - protein, 95 aa, Thermosynechococcus elongatus
ASVVPQERQQDTRKHYPNYKVMVLNDDFNTFRHVAACLMKYIPNMTSDRAWELTNQVHYEGQAIVWVGPQEQAELYHEQLLRAGLTMAPLEPEGS

SEQ ID NO: 1036 - protein, 95 aa, Thermosynechococcus elongatus
ASVVPQERQQDTRKHYPNYKVLVLNDDFNTFRHVAACLMKYIPNKTSDRAWELTNQVHYEGQAIVWVGPQEQAELYHEQLLRAGLTMAPLEPEGS

SEQ ID NO: 1037 - protein, 95 aa, Thermosynechococcus elongatus
ASVVPQERQQDTRKHYPNYEVIVLNDDFNTFRHVAACLMKYIPNMTSDRAWELTNQVHYEGQAIVWVGPQEQAELYYEQLLRAGLTMAPLEPEGS

SEQ ID NO: 1038 - protein, 95 aa, Thermosynechococcus elongatus
ASVVPQERQQDTRQHYPNYKVIVLNDDFNTFRHVAACLMKYIPNKTSDRAWELTNQVHYEGQAIVWVGPQEQAELYHEQLLRAGLTMAPLEPEGS

SEQ ID NO: 1039 - protein, 95 aa, Thermosynechococcus elongatus
ASVVPQERQQDTGKHYPNYKVIVLNDDFNTFRHVAACLMKYIPNKTSDRAWELTNQVHYEGQAIVWVGPQEQAELYHEQLLRAGLTMAPLEPEGS

SEQ ID NO: 1040 - protein, 95 aa, Thermosynechococcus elongatus; identical to SEQ ID NO: 13

SEQ ID NO: 1041 - protein, 95 aa, Thermosynechococcus elongatus; identical to SEQ ID NO: 587

SEQ ID NO: 1042 - protein, 95 aa, Thermosynechococcus elongatus; identical to SEQ ID NO: 85

SEQ ID NO: 1043 - protein, 95 aa, Thermosynechococcus elongatus; identical to SEQ ID NO: 416

SEQ ID NO: 1044 - protein, 90 aa, Thermosynechococcus elongatus
ASVVPQERQQVTRKHHPNYKVIVLNDDFNTFRHVAACLMKYIPNMTSDRAWELTNQVHYEGQAIVWVGPQEQAELYHEQLLRAGLTMAPL

SEQ ID NO: 1045 - protein, 95 aa, Thermosynechococcus elongatus
ASVVPQERQQVTRKHHPNYKVIVLNDDFNTFRHVAACLMKYIPNMTSDRAWELTNQVHYEGQAIVWVGPQEQAELYHEQLLRAGLTMSPLEPEGS

SEQ ID NO: 1046 - protein, 95 aa, Thermosynechococcus elongatus; identical to SEQ ID NO: 158

SEQ ID NO: 1047 - protein, 95 aa, Thermosynechococcus elongatus; identical to SEQ ID NO: 103

SEQ ID NO: 1048 - protein, 95 aa, Thermosynechococcus elongatus; identical to SEQ ID NO: 593

SEQ ID NO: 1049 - protein, 95 aa, Thermosynechococcus elongatus
ASVVPQERQQVTRKHYTNYKVIVLNDDFNTFRHVAACLMKYIPNMTSDRAWELTNQVHYKGQAIVWVGPQEQAELNHEQLLRAGLTMAPLEPEGS

SEQ ID NO: 1050 - protein, 95 aa, Thermosynechococcus elongatus; identical to SEQ ID NO: 15

SEQ ID NO: 1051 - protein, 95 aa, Thermosynechococcus elongatus; identical to SEQ ID NO: 5

SEQ ID NO: 1052 - protein, 95 aa, Thermosynechococcus elongatus
ASVVPQERQQVTRKHYPNYKVRVLNDDFNTFRHVAACLMKYIPNMTSDRAWELTNQVHYKGQAIVWVGPQEQAELNHEQLLRAGLTMAPLEPEGS

SEQ ID NO: 1053 - protein, 95 aa, Thermosynechococcus elongatus
ASVVPQERQQVTRKHYPNYKVIVLNDDFNTFQHVAACLMKYIPNMTSDRAWELTNQVHYEGQTIVWVGPQEQAELYHEQLLRAGLTMAPLEPEGS

SEQ ID NO: 1054 - protein, 95 aa, Thermosynechococcus elongatus
ASVVPQERQQVTRKHYPNYKVIVLNDDFNTFQHVAACLMKYIPNMTSDRAWELTNQVHYKGQAIVWVGPQEQAELNHEQLLRAGLTMAPLEPEGS

SEQ ID NO: 1055 - protein, 95 aa, Thermosynechococcus elongatus
ASVVPQERQQVTRKHYPNYKVIVLNDDFNTFQHVVACLKKYIPNMISDRAWELTNQVHYGGRAIVWVGPQEQAELYHEQLLRAGLTRAPLEPEGS

SEQ ID NO: 1056 - protein, 95 aa, Thermosynechococcus elongatus; identical to SEQ ID NO: 353

SEQ ID NO: 1057 - protein, 36 aa, Thermosynechococcus elongatus
ASVVPQERQQVTRKHYPNYKVIVLNDDFNTFRHVAA

SEQ ID NO: 1058 - protein, 95 aa, Thermosynechococcus elongatus
ASVVPQERQQVTRKHYPNYKVIVLNDDFNTFRHVAACLKKYIPNMISDRAWELTNQVHYEGQAIVWVGPQEQAELYHEQLLRAGLTMAPLEPEGS

SEQ ID NO: 1059 - protein, 95 aa, Thermosynechococcus elongatus; identical to SEQ ID NO: 78

SEQ ID NO: 1060 - protein, 95 aa, Thermosynechococcus elongatus; identical to SEQ ID NO: 91

SEQ ID NO: 1061 - protein, 95 aa, Thermosynechococcus elongatus
ASVVPQERQQVTRKHYPNYKVIVLNDDFNTFRHVAACLMKYNPNMTSDRAWELTNQVHYGGRAIVWVGPQEQAELYHEQLLRAGLTMAPLEPEGS

SEQ ID NO: 1062 - protein, 95 aa, Thermosynechococcus elongatus; identical to SEQ ID NO: 15

SEQ ID NO: 1063 - protein, 95 aa, Thermosynechococcus elongatus
ASVVPQERQQVTRKHYPNYKVIVLNDDFNTFRHVAACLMKYIPNMTSDRAWELTNQVHYEGQAIVWVGPQEQAELYHEQLLRAGLTRAPLEPEGS

SEQ ID NO: 1064 - protein, 95 aa, Thermosynechococcus elongatus
ASVVPQERQQVTRKHYPNYKVIVLNDDFNTFRHVAACLMKYIPNMTSDRAWELTNQVHYEGQAIVWVGPQVQAELNHEQLLRAGLTMAPLEPEGS

SEQ ID NO: 1065 - protein, 95 aa, Thermosynechococcus elongatus
ASVVPQERQQVTRKHYPNYKVIVLNDDFNTFRHVAACLMKYIPNMTSDRAWELTNKVHYKGQAIVWVGPQEQAELNHEQLLRAGLTMAPLEPEGS

SEQ ID NO: 1066 - protein, 95 aa, Thermosynechococcus elongatus; identical to SEQ ID NO: 5

SEQ ID NO: 1067 - protein, 95 aa, Thermosynechococcus elongatus
ASVVPQERQQVTRKHYPNYKVIVLNDDFNTFRHVAACLMKYIPNMTSDRAWELTNQVHYKGQAIVWVDPQEQAELNHEQLLRAGLTMAPLEPEGS

SEQ ID NO: 1068 - protein, 95 aa, Thermosynechococcus elongatus
ASVVPQERQQVTRKHYPNYKVIVLNDDFNTFRHVAACLMKYIPNMTSDRAWELTNQVHYKGQAIVWVGPQEQAELNHEQWLRAGLTMAPLEPEGS

SEQ ID NO: 1069 - protein, 95 aa, Thermosynechococcus elongatus
ASVVPQERQQVTRKHYPNYKVIVLNDDFNTFRHVAACLMKYIPNMTSDRAWELTNQVHYKGQAIVWVGPQEQAELNHEQLVRAGLTMAPLEPEGS

SEQ ID NO: 1070 - protein, 95 aa, Thermosynechococcus elongatus
ASVVPQERQQVTRKHYPNYKVIVLNDDFNTFRHVAACLMKYIPNMTSDRAWELTNQVHYKGQAIVWVGPQEQAELNHEQLLRAGLTMATLEPEGS

SEQ ID NO: 1071 - protein, 95 aa, Thermosynechococcus elongatus
ASVVPQERQQVTRKHYPNYKVIVLNDDFNTFRHVAACLMKYIPNMTSDRAWELTNQVHYKGQAIVWVGPQEQAELNHEQLLRAGLTMAPLEQEGS

SEQ ID NO: 1072 - protein, 95 aa, Thermosynechococcus elongatus
ASVVPQERQQVTRKHYPNYKVIVLNDDFNTFRHVAACLMKYIPNMTSDRAWELTNQVHYKGQAIVWVGPQEQAELNHEQLLRAGLTMAPLVPEGS

SEQ ID NO: 1073 - protein, 95 aa, Thermosynechococcus elongatus
ASVVPQERQQVTRKHYPNYKVIVLNDDFNTFRHVAACLMKYIPNMTSDRAWELTNQVHYKGQAIVWVGPQEQAELNHEQLLRAGLTMAPFEPEGS

SEQ ID NO: 1074 - protein, 95 aa, Thermosynechococcus elongatus
ASVVPQERQQVTRKHYPNYKVIVLNDDFNTFRHVAACLMKYIPNMTSDRAWELTNQVHYKGQAIVWVGPQEQAELNHEHLLRAGLTMAPLEPEGS

SEQ ID NO: 1075 - protein, 95 aa, Thermosynechococcus elongatus; identical to SEQ ID NO: 5

SEQ ID NO: 1076 - protein, 95 aa, Thermosynechococcus elongatus
ASVVPQERQQVTRKHYPNYKVIVLNDDFNTFRHVAACLMKYIPNMTSDRAWELTNQVHYKGQAIVWVGPQEQAELYHEQLLRVGLTMAPLEPEGS

SEQ ID NO: 1077 - protein, 95 aa, Thermosynechococcus elongatus
ASVVPQERQQVTRKHYPNYKVIVLNDDFNTFRHVAACLMKYIPNMTSDRAWELTNQVHYKGQAIVWVGPQVQAELYHEQLLRAGLTMAPLEPEGS

SEQ ID NO: 1078 - protein, 95 aa, Thermosynechococcus elongatus; identical to SEQ ID NO: 1077

SEQ ID NO: 1079 - protein, 95 aa, Thermosynechococcus elongatus
ASVVPQERQQVTRKHYPNYKVIVLNDDFNTFRHVAACLMKYIPNMTSDRAWELTNQVHYKGQAIVWVCPQEQAELNHEQLLRAGLTMAPLEPEGS

SEQ ID NO: 1080 - protein, 95 aa, Thermosynechococcus elongatus
ASVVPQERQQVTRKHYPNYKVIVLNDDFNTFRHVAACLMKYIPNMTSDRAWELTNQVHYKGQAIVLVGPQEQAELNHEQLLRAGLTMAPLEPEGS

SEQ ID NO: 1081 - protein, 95 aa, Thermosynechococcus elongatus
ASVVPQERQQVTRKHYPNYKVIVLNDDFNTFRHVAACLMKYIPNMTSDRAWELTNQVHYNGQAIVWVGPQEQAELNHEQLLRAGLTMAPLEPEGS

SEQ ID NO: 1082 - protein, 95 aa, Thermosynechococcus elongatus; identical to SEQ ID NO: 154

SEQ ID NO: 1083 - protein, 95 aa, Thermosynechococcus elongatus; identical to SEQ ID NO: 419

SEQ ID NO: 1084 - protein, 95 aa, Thermosynechococcus elongatus
ASVVPQERQQVTRKHYPNYKVIVLNDDFNTFRHVAACLMKYIPNMTSDRAWELTNQVHYGGQAIVWVGPQEQAELYHEQLLRAGLTMAPLEPEGS

SEQ ID NO: 1085 - protein, 95 aa, Thermosynechococcus elongatus; identical to SEQ ID NO: 778

SEQ ID NO: 1086 - protein, 95 aa, Thermosynechococcus elongatus
ASVVPQERQQVTRKHYPNYKVIVLNDDFNTFRHVAACLMKYIPNMTSDRAWELTNQVYYKGQAIVWVGPQEQAELNHEQLLRAGLTMAPLEPEGS

SEQ ID NO: 1087 - protein, 95 aa, Thermosynechococcus elongatus
ASVVPQERQQVTRKHYPNYKVIVLNDDFNTFRHVAACLMKCIPNMTSDRAWELTNQVHYKGQAIVWVGPQEQAELNHEQLLRAGLTMAPLEPEGS

SEQ ID NO: 1088 - protein, 95 aa, Thermosynechococcus elongatus
ASVVPQERQQVTRKHYPNYKVIVLNDDFNTFRHVVACLKKYIPNMISDRAWELTNQVHYGGRAIVWVGPQEQAELYHEQLLRAGLTMAPLEPGGS

SEQ ID NO: 1089 - protein, 95 aa, Thermosynechococcus elongatus
ASVVPQERQQVTRKHYPNYTVIVLNDDFNTFRHVAACLMKYIPNMTSDRAWELTNQVHYKGQAIVWVGPQEQAELNHEQLLRAGLTMAPLEPEGS

SEQ ID NO: 1090 - protein, 95 aa, Thermosynechococcus elongatus
ASVVPQERQQVTRKHYPNYEVIVLNDDFNTFRHVAACLMKYIPNMTSDRAWELTNQVHYKGQAIVWVGPQEQAELNHEQLLRAGLTMAPLEPEGS

SEQ ID NO: 1091 - protein, 95 aa, Thermosynechococcus elongatus
ASVVPQERQQVTSKHYPNYKVIVLNDDFNTFQHVVACLKKYIPNMISDRAWELTNQVHYGGRAIVWVGPQEQAELYHEQLLRAGLTMAPLEPEGS

SEQ ID NO: 1092 - protein, 95 aa, Thermosynechococcus elongatus
ASVVPQERQQVTSKHYPNYKVIVLNDDFNTFRHVAACLMKYIPNMTSDRAWELTNQVHYEGQAIVWVGPQEQAELYHEQLLRAGLTMAPLEPGGS

SEQ ID NO: 1093 - protein, 95 aa, Thermosynechococcus elongatus
ASVVPQERQQVTSKHYPNYKVIVLNDDFNTFRHVAACLMKYIPNMTSDRAWELTNQVHYGGRAIVWVGPQEQAELYHEQLLRAGLTMAPLEPEGS

SEQ ID NO: 1094 - protein, 95 aa, Thermosynechococcus elongatus; identical to SEQ ID NO: 5

SEQ ID NO: 1095 - protein, 95 aa, Thermosynechococcus elongatus
ASVVPQERQQVARKHYPNYKVIVLNDDFNTFQHVAACLKKYIPNMISDRAWELTNQVHYGGRAIVWVGPQEQAELYHEQLLRAGLTMAPLEPEGS

SEQ ID NO: 1096 - protein, 95 aa, Thermosynechococcus elongatus
ASVVPQERQQVARKHYPNYKVIVLNDDFNTFQHVAACLMKYIPNMISDRAWELTNQVHYGGRAIVWVGPQEQAELYHEQLLRAGLTMAPLEPEGS

SEQ ID NO: 1097 - protein, 95 aa, Thermosynechococcus elongatus; identical to SEQ ID NO: 166

SEQ ID NO: 1098 - protein, 95 aa, Thermosynechococcus elongatus
ASVVPQERQRDTRKHYPNYKVIVLNDDFNTFRHVAACLMKYIPNKTSDRAWELTNQVHYEGQAIVWVGPQEQAELYHEQLLRAGLTMAPLEPEGS

SEQ ID NO: 1099 - protein, 95 aa, Thermosynechococcus elongatus
ASVVPQEGQQDTRKHYPNYKVIVLNDDFNTFRHVAACLKKYIPNMISDRAWELTNQVHYGGRAIVWVGPQEQAELYHEQLLRAGLTMAPLEPEGS

SEQ ID NO: 1100 - protein, 95 aa, Thermosynechococcus elongatus; identical to SEQ ID NO: 83

SEQ ID NO: 1101 - protein, 95 aa, Thermosynechococcus elongatus
ASVVPQEGQQDTRKHYPNYKVIVLNDDFNTFRHVAACLMKYIPNMTSDRAWELTNQVHYEGQAIVWVGPQEQAELYHEQLLRAGLTMAPLEPGGS

SEQ ID NO: 1102 - protein, 95 aa, Thermosynechococcus elongatus
ASVVPQEGQQDTRKHYPNYKVIVLNDDFNTFRHVAACLMKYIPNMTSDRAWELTNQVHYEGQAIVWVGPQEQAELYHEQLLRVGLTMAPLEPEGS

SEQ ID NO: 1103 - protein, 95 aa, Thermosynechococcus elongatus
ASVVPQEGQQDTRKHYPNYKVIVLNDDFNTFRHVAACLMKYIPNMTSDRAWELTNQVHYGGRAIVWVGPQEQAELYHEQLLRAGLTMAPLEPEGS

SEQ ID NO: 1104 - protein, 95 aa, Thermosynechococcus elongatus
ASVVPQEGQQATRKHYPNYKVIVLNDDFNTFQHVVACLKKYIPNMISDRAWELTNQVHYGGRAIVWVGPQEQAELYHEQLLRAGLTMAPLEPEGS

SEQ ID NO: 1105 - protein, 95 aa, Thermosynechococcus elongatus; identical to SEQ ID NO: 1

SEQ ID NO: 1106 - protein, 95 aa, Thermosynechococcus elongatus
ASVVPQEGQQVTRKHNPNYKVIVLNDDFNTFQHVVACLKKYIPNMISDRAWELTNQVHYGGRAIVWVGPQEQAELYHEQLLRAGLTMAPLEPEGS

SEQ ID NO: 1107 - protein, 15 aa, Thermosynechococcus elongatus
ASVVPQEGQQVTRKH

SEQ ID NO: 1108 - protein, 95 aa, Thermosynechococcus elongatus; identical to SEQ ID NO: 301

SEQ ID NO: 1109 - protein, 95 aa, Thermosynechococcus elongatus
ASVVPQEGQQVTRKHYPNNKVIVLNDDFNTFQHVVACLKKYIPNMISDRAWELTNQVHYGGRAIVWVGPQEQAELYHEQLLRAGLTMAPLEPEGS

SEQ ID NO: 1110 - protein, 95 aa, Thermosynechococcus elongatus
ASVVPQEGQQVTRKHYPNYKVIVLNDNFNTFQHVVACLKKYIPNMISDRAWELTNQVHYGGRAIVWVGPQEQAELYHEQLLRAGLTMAPLEPEGS

SEQ ID NO: 1111 - protein, 95 aa, Thermosynechococcus elongatus
ASVVPQEGQQVTRKHYPNYKVIVLNDDYNTFQHVVACLKKYIPNMISDRAWELTNQVHYGGRAIVWVGPQEQAELYHEQLLRAGLTMAPLEPEGS

SEQ ID NO: 1112 - protein, 95 aa, Thermosynechococcus elongatus
ASVVPQEGQQVTRKHYPNYKVIVLNDDFNNFQHVVACLKKYIPNMISDRAWELTNQVHYGGRAIVWVGPQEQAELYHEQLLRAGLTMAPLEPEGS

SEQ ID NO: 1113 - protein, 95 aa, Thermosynechococcus elongatus; identical to SEQ ID NO: 324

SEQ ID NO: 1114 - protein, 95 aa, Thermosynechococcus elongatus
ASVVPQEGQQVTRKHYPNYKVIVLNDDFNTVQHVVACLKKYIPNMISDRAWELTNQVHYGGRAIVWVGPQEQAELYHEQLLRAGLTMAPLEPEGS

SEQ ID NO: 1115 - protein, 95 aa, Thermosynechococcus elongatus; identical to SEQ ID NO: 362

SEQ ID NO: 1116 - protein, 95 aa, Thermosynechococcus elongatus
ASVVPQEGQQVTRKHYPNYKVIVLNDDFNTFQQVVACLKKYIPNMISDRAWELTNQVHYGGRAIVWVGPQEQAELYHEQLLRAGLTMAPLEPEGS

SEQ ID NO: 1117 - protein, 95 aa, Thermosynechococcus elongatus; identical to SEQ ID NO: 1

SEQ ID NO: 1118 - protein, 95 aa, Thermosynechococcus elongatus
ASVVPQEGQQVTRKHYPNYKVIVLNDDFNTFQHVIACLKKYIPNMISDRAWELTNQVHYGGRAIVWVGPQEQAELYHEQLLRAGLTMAPLEPEGS

SEQ ID NO: 1119 - protein, 95 aa, Thermosynechococcus elongatus
ASVVPQEGQQVTRKHYPNYKVIVLNDDFNTFQHVAACLMKYIPNMTSDRAWELTNQVHYEGQAIVWVGPQEQAELYHEQLLRAGLTMAPLEPGGS

SEQ ID NO: 1120 - protein, 95 aa, Thermosynechococcus elongatus; identical to SEQ ID NO: 1

SEQ ID NO: 1121 - protein, 40 aa, Thermosynechococcus elongatus
ASVVPQEGQQVTRKHYPNYKVIVLNDDFNTFQHVVACLKK

SEQ ID NO: 1122 - protein, 95 aa, Thermosynechococcus elongatus
ASVVPQEGQQVTRKHYPNYKVIVLNDDFNTFQHVVACLKKYIPNKTSDRAWELTNQVHYVGQAIVWVGPQERAELYHEQLLRAGLTMAPLEPEGS

SEQ ID NO: 1123 - protein, 95 aa, Thermosynechococcus elongatus
ASVVPQEGQQVTRKHYPNYKVIVLNDDFNTFQHVVACLKKYIPNMTSDRAWELTNQVHYEGQAIVWVGPQEQAELYHEQLLRTGLTMAPLEPEGS

SEQ ID NO: 1124 - protein, 95 aa, Thermosynechococcus elongatus
ASVVPQEGQQVTRKHYPNYKVIVLNDDFNTFQHVVACLKKYIPNMISDRDWELTNQVHYGGRAIVWVGPQEQAELYHEQLLRAGLTMAPLEPEGS

SEQ ID NO: 1125 - protein, 95 aa, Thermosynechococcus elongatus
ASVVPQEGQQVTRKHYPNYKVIVLNDDFNTFQHVVACLKKYIPNMISDRAWELTNQVHDGGRAIVWVGPQEQAELYHEQLLRAGLTMAPLEPEGS

SEQ ID NO: 1126 - protein, 58 aa, Thermosynechococcus elongatus
ASVVPQEGQQVTRKHYPNYKVIVLNDDFNTFQHVVACLKKYIPNMISDRAWELTNQVH

SEQ ID NO: 1127 - protein, 95 aa, Thermosynechococcus elongatus
ASVVPQEGQQVTRKHYPNYKVIVLNDDFNTFQHVVACLKKYIPNMISDRAWELTNQVHYEGQAIVWVGPQEQAELYHEQLLRAGLTMAPLEPKGS

SEQ ID NO: 1128 - protein, 95 aa, Thermosynechococcus elongatus
ASVVPQEGQQVTRKHYPNYKVIVLNDDFNTFQHVVACLKKYIPNMISDRAWELTNQVHYEGRAIVWVGPQEQAELYHEQLLRAGLTMAPLEPEGS

SEQ ID NO: 1129 - protein, 95 aa, Thermosynechococcus elongatus
ASVVPQEGQQVTRKHYPNYKVIVLNDDFNTFQHVVACLKKYIPNMISDRAWELTNQVHYGARAIVWVGPQEQAELYHEQLLRAGLTMAPLEPEGS

SEQ ID NO: 1130 - protein, 95 aa, Thermosynechococcus elongatus
ASVVPQEGQQVTRKHYPNYKVIVLNDDFNTFQHVVACLKKYIPNMISDRAWELTNQVHYGGQAIVWVGPQEQAELYHEQLLRTGLTMAPLEPEGS

SEQ ID NO: 1131 - protein, 95 aa, Thermosynechococcus elongatus; identical to SEQ ID NO: 1

SEQ ID NO: 1132 - protein, 95 aa, Thermosynechococcus elongatus
ASVVPQEGQQVTRKHYPNYKVIVLNDDFNTFQHVVACLKKYIPNMISDRAWELTNQVHYGGRAIAWVGPQEQAELYHEQLLRAGLTMAPLEPEGS

SEQ ID NO: 1133 - protein, 95 aa, Thermosynechococcus elongatus
ASVVPQEGQQVTRKHYPNYKVIVLNDDFNTFQHVVACLKKYIPNMISDRAWELTNQVHYGGRAIVWVGPQEQAKLYHEQLLRAGLTMAPLEPEGS

SEQ ID NO: 1134 - protein, 95 aa, Thermosynechococcus elongatus
ASVVPQEGQQVTRKHYPNYKVIVLNDDFNTFQHVVACLKKYIPNMISDRAWELTNQVHYGGRAIVWVGPQEQAESYHEQLLRAGLTMAPLEPEGS

SEQ ID NO: 1135 - protein, 95 aa, Thermosynechococcus elongatus; identical to SEQ ID NO: 800

SEQ ID NO: 1136 - protein, 75 aa, Thermosynechococcus elongatus
ASVVPQEGQQVTRKHYPNYKVIVLNDDFNTFQHVVACLKKYIPNMISDRAWELTNQVHYGGRAIVWVGPQEQAEL

SEQ ID NO: 1137 - protein, 95 aa, Thermosynechococcus elongatus
ASVVPQEGQQVTRKHYPNYKVIVLNDDFNTFQHVVACLKKYIPNMISDRAWELTNQVHYGGRAIVWVGPQEQAELYHEQVLRAGLTMAPLEPEGS

SEQ ID NO: 1138 - protein, 79 aa, Thermosynechococcus elongatus
ASVVPQEGQQVTRKHYPNYKVIVLNDDFNTFQHVVACLKKYIPNMISDRAWELTNQVHYGGRAIVWVGPQEQAELYHEQ

SEQ ID NO: 1139 - protein, 95 aa, Thermosynechococcus elongatus
ASVVPQEGQQVTRKHYPNYKVIVLNDDFNTFQHVVACLKKYIPNMISDRAWELTNQVHYGGRAIVWVGPQEQAELYHEQFLRAGLTMAPLEPEGS

SEQ ID NO: 1140 - protein, 95 aa, Thermosynechococcus elongatus
ASVVPQEGQQVTRKHYPNYKVIVLNDDFNTFQHVVACLKKYIPNMISDRAWELTNQVHYGGRAIVWVGPQEQAELYHEQLSRAGLTMAPLEPEGS

SEQ ID NO: 1141 - protein, 84 aa, Thermosynechococcus elongatus
ASVVPQEGQQVTRKHYPNYKVIVLNDDFNTFQHVVACLKKYIPNMISDRAWELTNQVHYGGRAIVWVGPQEQAELYHEQLLRAG

SEQ ID NO: 1142 - protein, 95 aa, Thermosynechococcus elongatus; identical to SEQ ID NO: 1

SEQ ID NO: 1143 - protein, 95 aa, Thermosynechococcus elongatus
ASVVPQEGQQVTRKHYPNYKVIVLNDDFNTFQHVVACLKKYIPNMISDRAWELTNQVHYGGRAIVWVGPQEQAELYHEQLLRAGLTTAPLEPEGS

SEQ ID NO: 1144 - protein, 95 aa, Thermosynechococcus elongatus
ASVVPQEGQQVTRKHYPNYKVIVLNDDFNTFQHVVACLKKYIPNMISDRAWELTNQVHYGGRAIVWVGPQEQAELYHEQLLRAGLTMAPREPEGS

SEQ ID NO: 1145 - protein, 93 aa, Thermosynechococcus elongatus
ASVVPQEGQQVTRKHYPNYKVIVLNDDFNTFQHVVACLKKYIPNMISDRAWELTNQVHYGGRAIVWVGPQEQAELYHEQLLRAGLTMAPLEPE

SEQ ID NO: 1146 - protein, 95 aa, Thermosynechococcus elongatus
ASVVPQEGQQVTRKHYPNYKVIVLNDDFNTFQHVVACLKKYIPNMISDRAWELTNQVHYGGRAIVWVGPQEQAELYHEQLLRAGLTMAPLEPDGS

SEQ ID NO: 1147 - protein, 95 aa, Thermosynechococcus elongatus
ASVVPQEGQQVTRKHYPNYKVIVLNDDFNTFQHVVACLKKYIPNMISDRAWELTNQVHYGGRAIVWVGPQEQAELYHEQLLRAGLTMAPLEREGS

SEQ ID NO: 1148 - protein, 75 aa, Thermosynechococcus elongatus; identical to SEQ ID NO: 1136

SEQ ID NO: 1149 - protein, 95 aa, Thermosynechococcus elongatus
ASVVPQEGQQVTRKHYPNYKVIVLNDDFNTFQHVVACLKKYIPNMISDRAWELTNQVHYGGRAIVWVGPQEQAELCHEQLLRAGLTMAPLEPEGS

SEQ ID NO: 1150 - protein, 95 aa, Thermosynechococcus elongatus
ASVVPQEGQQVTRKHYPNYKVIVLNDDFNTFQHVVACLKKYIPNMISDRAWELTNQVHYGGRAIVWVGPQEQAGLYHEQLLRAGLTMAPLEPEGS

SEQ ID NO: 1151 - protein, 95 aa, Thermosynechococcus elongatus; identical to SEQ ID NO: 1

SEQ ID NO: 1152 - protein, 95 aa, Thermosynechococcus elongatus
ASVVPQEGQQVTRKHYPNYKVIVLNDDFNTFQHVVACLKKYIPNMISDRAWELTNQVHYGGRAIVWVGLQEQAELYHEQLLRAGLTMAPLEPEGS

SEQ ID NO: 1153 - protein, 95 aa, Thermosynechococcus elongatus
ASVVPQEGQQVTRKHYPNYKVIVLNDDFNTFQHVVACLKKYIPNMISDRAWELTNQVHYGVRAIVWVGPQEQAELYHEQLLRAGLTMAPLEPEGS

SEQ ID NO: 1154 - protein, 95 aa, Thermosynechococcus elongatus; identical to SEQ ID NO: 1

SEQ ID NO: 1155 - protein, 95 aa, Thermosynechococcus elongatus
ASVVPQEGQQVTRKHYPNYKVIVLNDDFNTFQHVVACLKKYIPNMISDRAWELTNQVRYGGRAIVWVGPQEQAELYHEQLLRAGLTMAPLEPEGS

SEQ ID NO: 1156 - protein, 95 aa, Thermosynechococcus elongatus
ASVVPQEGQQVTRKHYPNYKVIVLNDDFNTFQHVVACLKKYIPNMISDRAWELTNQVYYGGRAIVWVGPQEQAELYHEQLLRAGLTMAPLEPEGS

SEQ ID NO: 1157 - protein, 95 aa, Thermosynechococcus elongatus
ASVVPQEGQQVTRKHYPNYKVIVLNDDFNTFQHVVACLKKYIPNMISDRAWELTNQFHYGGRAIVWVGPQEQAELYHEQLLRAGLTMAPLEPEGS

SEQ ID NO: 1158 - protein, 95 aa, Thermosynechococcus elongatus
ASVVPQEGQQVTRKHYPNYKVIVLNDDFNTFQHVVACLKKYIPNMISDRAWELANQVHYGGRAIVWVGPQEQAELYHEQLLRAGLTMAPLEPEGS

SEQ ID NO: 1159 - protein, 95 aa, Thermosynechococcus elongatus
ASVVPQEGQQVTRKHYPNYKVIVLNDDFNTFQHVVACLKKYIPNMISDRAWVLTNQVHYGGRAIVWVGPQEQAELYHEQLLRAGLTMAPLEPEGS

SEQ ID NO: 1160 - protein, 51 aa, Thermosynechococcus elongatus
ASVVPQEGQQVTRKHYPNYKVIVLNDDFNTFQHVVACLKKYIPNMISDRAW

SEQ ID NO: 1161 - protein, 95 aa, Thermosynechococcus elongatus
ASVVPQEGQQVTRKHYPNYKVIVLNDDFNTFQHVVACLKKYIPNMISDIAWELTNQVHYGGRAIVWVGPQEQAELYHEQLLRAGLTMAPLEPEGS

SEQ ID NO: 1162 - protein, 95 aa, Thermosynechococcus elongatus; identical to SEQ ID NO: 255

SEQ ID NO: 1163 - protein, 95 aa, Thermosynechococcus elongatus
ASVVPQEGQQVTRKHYPNYKVIVLNDDFNTFQHVVACLKKYIPTMISDRAWELTNQVHYGGRAIVWVGPQEQAELYHEQLLRAGLTMAPLEPEGS

SEQ ID NO: 1164 - protein, 95 aa, Thermosynechococcus elongatus
ASVVPQEGQQVTRKHYPNYKVIVLNDDFNTFQHVVACLKKYIPIMISDRAWELTNQVHYGGRAIVWVGPQEQAELYHEQLLRAGLTMAPLEPEGS

SEQ ID NO: 1165 - protein, 95 aa, Thermosynechococcus elongatus; identical to SEQ ID NO: 1

SEQ ID NO: 1166 - protein, 95 aa, Thermosynechococcus elongatus
ASVVPQEGQQVTRKHYPNYKVIVLNDDFNTFQHVVACLKNYIPNMISDRAWELTNQVHYGGRAIVWVGPQEQAELYHEQLLRAGLTMAPLEPEGS

SEQ ID NO: 1167 - protein, 95 aa, Thermosynechococcus elongatus
ASVVPQEGQQVTRKHYPNYKVIVLNDDFNTFQHVVACLMKYIPNMTSDRAWELTNQVHYEGQAIVWVGPQEQAELYHEQLLRAGLTMAPLEPGGS

SEQ ID NO: 1168 - protein, 95 aa, Thermosynechococcus elongatus
ASVVPQEGQQVTRKHYPNYKVIVLNDDFNTFQHVVACLMKYIPNMTSDRAWELTNQVHYKGQAIVWVGPQEQAELNHEQLLRAGLTMAPLEPGGS

SEQ ID NO: 1169 - protein, 38 aa, Thermosynechococcus elongatus
ASVVPQEGQQVTRKHYPNYKVIVLNDDFNTFQHVVACL

SEQ ID NO: 1170 - protein, 95 aa, Thermosynechococcus elongatus; identical to SEQ ID NO: 1

SEQ ID NO: 1171 - protein, 95 aa, Thermosynechococcus elongatus
ASVVPQEGQQVTRKHYPNYKVIVLNDDFNTFRHVDACLMKYIPNMTSDRAWELTNQVHYEGQAIVWVGPQEQAELYHEQLLRAGLTMAPLEPEGS

SEQ ID NO: 1172 - protein, 95 aa, Thermosynechococcus elongatus
ASVVPQEGQQVTRKHYPNYKVIVLNDDFNTFRHVAACLKKYIPNMISDRAWELTNQVHYGGRAIVWVGPQEQAELYHEQLLRAGLTMAPLEPGGS

SEQ ID NO: 1173 - protein, 95 aa, Thermosynechococcus elongatus
ASVVPQEGQQVTRKHYPNYKVIVLNDDFNTFRHVAACLMKYIPNKTSDRAWELTNQVHYEGQAIVWVGPQEQAELYHEQLLRAGLTMAPLEPKGS

SEQ ID NO: 1174 - protein, 95 aa, Thermosynechococcus elongatus; identical to SEQ ID NO: 11

SEQ ID NO: 1175 - protein, 95 aa, Thermosynechococcus elongatus
ASVVPQEGQQVTRKHYPNYKVIVLNDDFNTFRHVAACLMKYIPNMTSDRAWELTNQVHYEGQAIVWVGPQEQAELYHEQLLRAGLTRAPLEPEGS

SEQ ID NO: 1176 - protein, 95 aa, Thermosynechococcus elongatus
ASVVPQEGQQVTRKHYPNYKVIVLNDDFNTFRHVAACLMKYIPNMTSDRAWELTNQVHYEGQAIVWVGPQEQAELYHEQLLRAGLTMAPLEPKGS

SEQ ID NO: 1177 - protein, 95 aa, Thermosynechococcus elongatus
ASVVPQEGQQVTRKHYPNYKVIVLNDDFNTFRHVAACLMKYIPNMTSDRAWELTNQVHYEGQAIVWVGPQEQAELYHEQLLRAGLTMASLEPEGS

SEQ ID NO: 1178 - protein, 95 aa, Thermosynechococcus elongatus
ASVVPQEGQQVTRKHYPNYKVIVLNDDFNTFRHVAACLMKYIPNMTSDRAWELTNQVHYEGQAIVWVGPREQAELYHEQLLRAGLTMAPLEPEGS

SEQ ID NO: 1179 - protein, 95 aa, Thermosynechococcus elongatus; identical to SEQ ID NO: 1178

SEQ ID NO: 1180 - protein, 95 aa, Thermosynechococcus elongatus
ASVVPQEGQQVTRKHYPNYKVIVLNDDFNTFRHVAACLMKYIPNMTSDRAWELTNQVHYVGQAIVWVGPQEQAELYHEQLLRAGLTMAPLEPKGS

SEQ ID NO: 1181 - protein, 95 aa, Thermosynechococcus elongatus
ASVVPQEGQQVTRKHYPNYKVIVLNDDFNTFRHVAACLMKYIPNMISDRAWELTNQVHYEGQAIVWVGPQEQAELYHEQLLRAGLTMAPLEPEGS

SEQ ID NO: 1182 - protein, 95 aa, Thermosynechococcus elongatus
ASVVPQEGQQVTRKHYPNYKVIVLNDDFNTFRHVAACLMKYIPNMSSDRAWELTNQVHYEGQAIVWVGPQEQAELYHEQLLRAGLTMAPLEPEGS

SEQ ID NO: 1183 - protein, 95 aa, Thermosynechococcus elongatus; identical to SEQ ID NO: 278

SEQ ID NO: 1184 - protein, 95 aa, Thermosynechococcus elongatus; identical to SEQ ID NO: 138

SEQ ID NO: 1185 - protein, 95 aa, Thermosynechococcus elongatus; identical to SEQ ID NO: 1

SEQ ID NO: 1186 - protein, 95 aa, Thermosynechococcus elongatus
ASVVPQEGQQVTRKHYPNYKVIVLYDDFNTFQHVVACLKKYIPNMISDRAWELTNQVHYGGRAIVWVGPQEQAELYHEQLLRAGLTMAPLEPEGS

SEQ ID NO: 1187 - protein, 95 aa, Thermosynechococcus elongatus
ASVVPQEGQQVTRKHYPNYEVIVLNDDFNTFQHVVACLKKYIPNMISDRAWELTNQVHYGGRAIVWVGPQEQAELYHEQLLRAGLTMAPLEPEGS

SEQ ID NO: 1188 - protein, 95 aa, Thermosynechococcus elongatus
ASVVPQEGQQVTRKHYPNCKVIVLNDDFNTFQHVVACLKKYIPNMISDRAWELTNQVHYGGRAIVWVGPQEQAELYHEQLLRAGLTMAPLEPEGS

SEQ ID NO: 1189 - protein, 12 aa, Thermosynechococcus elongatus
ASVVPQEGQQVT

SEQ ID NO: 1190 - protein, 95 aa, Thermosynechococcus elongatus
ASVVPQEGQQVARKHYPNYKVIVLNDDFNTFQHVAACLMKYIPNMTSDRAWELTNQVHYVGQAIVWVGPQEQAELYHEQLLRAGLTMAPLEPKGS

SEQ ID NO: 1191 - protein, 95 aa, Thermosynechococcus elongatus; identical to SEQ ID NO: 495

SEQ ID NO: 1192 - protein, 95 aa, Thermosynechococcus elongatus
ASVVPQEGQQVARKHYPNYKVIVLNDDFNTFRHVAACLMKYIPNMTSDRAWELTNQVHYKGQAIVWVGPQEQAELNHEQLLRAGLTMAPLEPEGS

SEQ ID NO: 1193 - protein, 9 aa, Thermosynechococcus elongatus
ASVVPQEGQ

SEQ ID NO: 1194 - protein, 95 aa, Thermosynechococcus elongatus
ASVVPQEKQQVSRKHYPNYKVIVLNDDFNTFQHVAACLMKYIPNMTSDRAWELTNQVHYKGQAIVWVGPQEQAELYHGQLLRAGLTMAPLEPEGS

SEQ ID NO: 1195 - protein, 95 aa, Thermosynechococcus elongatus
ASVVPQVRQQDTRKHYPNYKVIVLNDDFNTFQHVVACLKKYIPNMISDRAWELTNQVHYGGRAIVWVGPQEQAELYHEQLLRAGLTMAPLEPEGS

SEQ ID NO: 1196 - protein, 95 aa, Thermosynechococcus elongatus
ASVVPQVRQQDTRKHYPNYKVIVLNDDFNTFRHVAACLMKYIPNKTSDRAWELTNQVHYEGQAIVWVGPQEQAELYHEQLLRAGLTMAPLEPEGS

SEQ ID NO: 1197 - protein, 6 aa, Thermosynechococcus elongatus
ASVVPQ

SEQ ID NO: 1198 - protein, 6 aa, Thermosynechococcus elongatus
ASVVPQ

SEQ ID NO: 1199 - protein, 95 aa, Thermosynechococcus elongatus; identical to SEQ ID NO: 2

SEQ ID NO: 1200 - protein, 95 aa, Thermosynechococcus elongatus; identical to SEQ ID NO: 2

SEQ ID NO: 1201 - protein, 95 aa, Thermosynechococcus elongatus
ASFVPQEGQQVTRKHYPNYKVIVLNDDFNTFQHVVACLKKYIPNMISDRAWELTNQVHYGGRAIVWVGPQEQAELYHEQLLRAGLTMAPLEPEGS

SEQ ID NO: 1202 - protein, 95 aa, Thermosynechococcus elongatus
ARVVPQERQQDTRKHYPNYKVIVLNDDFNTFRHVAACLMKYIPNMTSDRAWELTNQVHYEGQAIVWVGPQEQAELYHEQLLRAGLTMAPLEPEGS

SEQ ID NO: 1203 - protein, 95 aa, Thermosynechococcus elongatus
ASIVPQERQQVARKHYPNYKVIVLNDDFNTFRHVAACLMKYIPNMTSDRAWELTNQVHYEGQAIVWVGPQVQAELYHEQLLRAGLTMAPLEPGGS

SEQ ID NO: 1204 - protein, 95 aa, Thermosynechococcus elongatus
ASIVPQERQQDTRKHYPNYKVIVLNDDFNTFRHVAACLMKYIPNMTSDRAWELTNQVHYEGQAIVWVGPQEQAELYHEQLLRAGLTMAPLEPEGS

SEQ ID NO: 1205 - protein, 95 aa, Thermosynechococcus elongatus
ASAVPQERQQVARKHYPNYNVIVLNDDFNTFRHVAACLMKYIPNMTSDRAWELTNQVHYKGQAIVWVGPQEQAELNHEQLLRAGLTMAPLEPEGS

SEQ ID NO: 1206 - protein, 95 aa, Thermosynechococcus elongatus
ASAVPQERQQDTRKHYPNYKVIVLNDDFNTFRHVAACLMKYIPNMTSDRAWELTNQVHYEGQAIVWVGPQEQAELYHEQLLRAGLTMAPLEPGGS

SEQ ID NO: 1207 - protein, 95 aa, Thermosynechococcus elongatus
ASAVPQEGQQVTRKHYPNYKVIVLNDDFNTFQHVVACLKKYIPNMISDRAWELTNQVHYGGRAIVWVGPQEQAELYHEQLLRAGLTMAPLEPEGS

SEQ ID NO: 1208 - protein, 95 aa, Thermosynechococcus elongatus; identical to SEQ ID NO: 1

SEQ ID NO: 1209 - protein, 95 aa, Thermosynechococcus elongatus
ASVIPQERQQVTRKHYPNYKVIVLNDDFNTFRHVAACLMKYIPNKTSDRAWELTNQVHYEGQAIVWVGPQEQAELYHEQLLRAGLTMAPLEPEGS

SEQ ID NO: 1210 - protein, 95 aa, Thermosynechococcus elongatus
ASVEPQEGQQVTRKHYPNHKVIVLNDDFNTFQHVVACLKKYIPNMISDRAWELTNQVHYGGRAIVWVGPQEQAELYHEQLLRAGLTMAPLEPEGS

SEQ ID NO: 1211 - protein, 95 aa, Thermosynechococcus elongatus
ASVAPQERQQDTRKHYPNYKVIVLNDDFNTFRHVAACLMKYIPNMTSDRAWELTNQVHYEGQAIVWVGPQEQAELYHEQLLRAGLTMAPLEPEGS

SEQ ID NO: 1212 - protein, 95 aa, Thermosynechococcus elongatus
ASVAPQERQQVTRKHYPNYKVIVLNDDFNTFRHVAACLMKYIPNMTSDRAWELTNQVHYKGQAIVWVGPQEQAELNHEQLLRAGLTMAPLEPEGS

SEQ ID NO: 1213 - protein, 95 aa, Thermosynechococcus elongatus
ASVVTQERQQDTRKHYPNYKVIVLNDDFNTFRHVAACLMKYIPNKTSDRAWELTNQVHYEGQAIVWVGPQEQAELYHEQLLRAGLTMAPLEPEGS

SEQ ID NO: 1214 - protein, 95 aa, Thermosynechococcus elongatus
ASVVTQERQQDTRKHYPNYKVIVLNDDFNTFRHVAACLMKYIPNMTSDRAWELTNQVHYEGQAIVWVGPQEQAELYHEQLLRAGLTMAPLEPEGS

SEQ ID NO: 1215 - protein, 95 aa, Thermosynechococcus elongatus
ASVVQQERQQVTRKHYPNYKVIVLNDDFNTFRHVAACLMKYIPNMTSDRAWELTNQVHYEGQAIVWVGPQEQAELYHEQLLRAGLTMAPLEPEGS

SEQ ID NO: 1216 - protein, 95 aa, Thermosynechococcus elongatus
ASVVQQEGQQVTRKHYPNYKVIVLNDDFNTFQHVVACLKKYIPNMISDRAWELTNQVHYEGQAIVWVGPQEQAELYHEQLLRAGLTMAPLEPEGS

SEQ ID NO: 1217 - protein, 95 aa, Thermosynechococcus elongatus
ASVVPKERQQDTRKHYPNYKVIVLNDDFNTFRHVAACLMKYIPNMTSDRAWELTNQVHYEGQAIVWVGPQEQAELYHEQLLRAGLTMAPLEPEGS

SEQ ID NO: 1218 - protein, 95 aa, Thermosynechococcus elongatus
ASVVPKEGQQVTRKHYPNYKVIVLNDDFNTFQHVVACLKKYIPNMISDRAWELTNQVHYGGRAIVWVGPQEQAELYHEQLLRAGLTMAPLEPEGS

SEQ ID NO: 1219 - protein, 95 aa, Thermosynechococcus elongatus; identical to SEQ ID NO: 12

SEQ ID NO: 1220 - protein, 95 aa, Thermosynechococcus elongatus; identical to SEQ ID NO: 7

SEQ ID NO: 1221 - protein, 15 aa, Thermosynechococcus elongatus
ASVVPQERQQVTRKH

SEQ ID NO: 1222 - protein, 95 aa, Thermosynechococcus elongatus
ASVVPQERQQVTRKHYPNYKVIVLNDDFNTFQHVVACLKKYIPNMISDRAWELTNQVHYKGQAIVWVGPQEQAELNHEQLLRAGLTMAPLEPEGS

SEQ ID NO: 1223 - protein, 95 aa, Thermosynechococcus elongatus; identical to SEQ ID NO: 168

SEQ ID NO: 1224 - protein, 95 aa, Thermosynechococcus elongatus
ASVVPQERQQVTRKHYPNYKVIVLNDDFNTFRHVAACLMKYIPNMTSDRAWELTNQVHYKGQAIVWVGPQERAELYHEQLLRAGLTMAPLEPEGS

SEQ ID NO: 1225 - protein, 95 aa, Thermosynechococcus elongatus; identical to SEQ ID NO: 15

SEQ ID NO: 1226 - protein, 95 aa, Thermosynechococcus elongatus; identical to SEQ ID NO: 3

SEQ ID NO: 1227 - protein, 95 aa, Thermosynechococcus elongatus; identical to SEQ ID NO: 6

SEQ ID NO: 1228 - protein, 95 aa, Thermosynechococcus elongatus
ASVVPQERQQVARKNYPNYKVIVLNDDFNTFRHVAACLMKYIPNMTSDRAWELTNQVHYEGQAIVWVGPQVQAELYHEQLLRAGLTMAPLEPGGS

SEQ ID NO: 1229 - protein, 95 aa, Thermosynechococcus elongatus
ASVVPQERQQVARKHHPNYKVIVLNDDFNTFRHVAACLMKYIPNMTSDRAWELTNQVHYEGQAIVWVGPQVQAELYHEQLLRAGLTMAPLEPGGS

SEQ ID NO: 1230 - protein, 95 aa, Thermosynechococcus elongatus
ASVVPQERQQVARKHYTNYKVIVLNDDFNTFRHVAACLMKYIPNMTSDRAWELTNQVHYEGQAIVWVGPQVQAELYHEQLLRAGLTMAPLEPGGS

SEQ ID NO: 1231 - protein, 95 aa, Thermosynechococcus elongatus
ASVVPQERQQVARKHYPNYKGIVLNDDFNTFRHVAACLMKYIPNMTSDRAWELTNQVHYKGQAIVWVGPQEQAELNHEQLLRAGLTMAPLEPEGS

SEQ ID NO: 1232 - protein, 95 aa, Thermosynechococcus elongatus; identical to SEQ ID NO: 3

SEQ ID NO: 1233 - protein, 95 aa, Thermosynechococcus elongatus; identical to SEQ ID NO: 3

SEQ ID NO: 1234 - protein, 95 aa, Thermosynechococcus elongatus; identical to SEQ ID NO: 673

SEQ ID NO: 1235 - protein, 95 aa, Thermosynechococcus elongatus
ASVVPQERQQVARKHYPNYKVRVLNDDFNTFRHVAACLMKYIPNMTSDRAWELTNQVHYEGQAIVWVGPQEQAELYHEQLLRAGLTMAPLEPEGS

SEQ ID NO: 1236 - protein, 95 aa, Thermosynechococcus elongatus
ASVVPQERQQVARKHYPNYKVIILNDDFNTFQHVAACLMKYIPNMTSDRAWELTNQVHYEGQAIVWVGPQEQAELYHEQLLRAGLTMAPLEPEGS

SEQ ID NO: 1237 - protein, 95 aa, Thermosynechococcus elongatus
ASVVPQERQQVARKHYPNYKVIILNDDFNTFQHVAACLMKYIPNMTSDRAWELTNQVHYGGRAIVWVGPQEQAELYHEQLLRAGLTMAPLEPEGS

SEQ ID NO: 1238 - protein, 95 aa, Thermosynechococcus elongatus; identical to SEQ ID NO: 3

SEQ ID NO: 1239 - protein, 95 aa, Thermosynechococcus elongatus
ASVVPQERQQVARKHYPNYKVIVVNDDFNTFRHVAACLMKYIPNMTSDRAWELTNQVHYEGQAIVWVGPQVQAELYHEQLLRAGLTMAPLEPGGS

SEQ ID NO: 1240 - protein, 23 aa, Thermosynechococcus elongatus
ASVVPQERQQVARKHYPNYKVIV

SEQ ID NO: 1241 - protein, 95 aa, Thermosynechococcus elongatus; identical to SEQ ID NO: 9

SEQ ID NO: 1242 - protein, 95 aa, Thermosynechococcus elongatus
ASVVPQERQQVARKHYPNYKVIVLNDEFNTFRHVAACLMKYIPNMTSDRAWELTNQVHYEGQAIVWVGPQVQAELYHEQLLRAGLTMAPLEPGGS

SEQ ID NO: 1243 - protein, 95 aa, Thermosynechococcus elongatus
ASVVPQERQQVARKHYPNYKVIVLNDDFKTFRHVAACLMKYIPNMTSDRAWELTNQVHYEGQAIVWVGPQVQAELYHEQLLRAGLTMAPLEPGGS

SEQ ID NO: 1244 - protein, 95 aa, Thermosynechococcus elongatus
ASVVPQERQQVARKHYPNYKVIVLNDDFNTLRHVAACLMKYIPNMTSDRAWELTNQVHYEGQAIVWVGPQVQAELYHEQLLRAGLTMAPLEPGGS

SEQ ID NO: 1245 - protein, 95 aa, Thermosynechococcus elongatus; identical to SEQ ID NO: 492

SEQ ID NO: 1246 - protein, 95 aa, Thermosynechococcus elongatus
ASVVPQERQQVARKHYPNYKVIVLNDDFNTFQHVAACLMKYIPNMTSDRALELTNQVHYVGQAIVWVGPQEQAELYHEQLLRAGLTMAPLEPEGS

SEQ ID NO: 1247 - protein, 95 aa, Thermosynechococcus elongatus
ASVVPQERQQVARKHYPNYKVIVLNDDFNTFQHVVACLKKYIPNMISDRAWESTNQVHYGGRAIVWVGPQEQAELYHEQLLRAGLTMAPLEPEGS

SEQ ID NO: 1248 - protein, 95 aa, Thermosynechococcus elongatus; identical to SEQ ID NO: 242

SEQ ID NO: 1249 - protein, 95 aa, Thermosynechococcus elongatus
ASVVPQERQQVARKHYPNYKVIVLNDDFNTFQHVVACLKKYIPNMISDRAWELTNQVHYEGQAIVWVGPQVQAELYHEQLLRAGLTMAPLEPEGS

SEQ ID NO: 1250 - protein, 95 aa, Thermosynechococcus elongatus
ASVVPQERQQVARKHYPNYKVIVLNDDFNTFQHVVACLKKYIPNMISDRAWELTNQVHYGGQAIVWVGPQVQAELYHEQLLRAGLTMAPLEPGGS

SEQ ID NO: 1251 - protein, 95 aa, Thermosynechococcus elongatus; identical to SEQ ID NO: 19

SEQ ID NO: 1252 - protein, 95 aa, Thermosynechococcus elongatus
ASVVPQERQQVARKHYPNYKVIVLNDDFNTFQHVVACLKKYIPNMISDRAWELTNQVHYGGRAIVWVCPQEQAELYHEQLLRAGLTMAPLEPEGS

SEQ ID NO: 1253 - protein, 95 aa, Thermosynechococcus elongatus
ASVVPQERQQVARKHYPNYKVIVLNDDFNTFQHVVACLMKYIPNKTSDRAWELTNQVHYEGQAIVWVGPQEQAELYHEQLLRAGLTMAPLEPEGS

SEQ ID NO: 1254 - protein, 95 aa, Thermosynechococcus elongatus
ASVVPQERQQVARKHYPNYKVIVLNDDFNTFQHVVACLMKYIPNMTSDRAWELTNQVHYEGQAIVWVGPQEQAELYHEQLLRAGLTMAPLEPEGS

SEQ ID NO: 1255 - protein, 95 aa, Thermosynechococcus elongatus
ASVVPQERQQVARKHYPNYKVIVLNDDFNTFRNVAACLMKYIPNMTSDRAWELTNQVHYEGQAIVWVGPQVQAELYHEQLLRAGLTMAPLEPGGS

SEQ ID NO: 1256 - protein, 95 aa, Thermosynechococcus elongatus
ASVVPQERQQVARKHYPNYKVIVLNDDFNTFRHDAACLMKYIPNMTSDRAWELTNQVHYEGQAIVWVGPQVQAELYHEQLLRAGLTMAPLEPGGS

SEQ ID NO: 1257 - protein, 95 aa, Thermosynechococcus elongatus
ASVVPQERQQVARKHYPNYKVIVLNDDFNTFRHAAACLMKYIPNMTSDRAWELTNQVHYEGQAIVWVGPQVQAELYHEQLLRAGLTMAPLEPGGS

SEQ ID NO: 1258 - protein, 95 aa, Thermosynechococcus elongatus
ASVVPQERQQVARKHYPNYKVIVLNDDFNTFRHVTACLMKYIPNMTSDRAWELTNQVHYEGQAIVWVGPQVQAELYHEQLLRAGLTMAPLEPGGS

SEQ ID NO: 1259 - protein, 95 aa, Thermosynechococcus elongatus; identical to SEQ ID NO: 3

SEQ ID NO: 1260 - protein, 95 aa, Thermosynechococcus elongatus
ASVVPQERQQVARKHYPNYKVIVLNDDFNTFRHVAECLMKYIPNMTSDRAWELTNQVHYEGQAIVWVGPQVQAELYHEQLLRAGLTMAPLEPGGS

SEQ ID NO: 1261 - protein, 95 aa, Thermosynechococcus elongatus
ASVVPQERQQVARKHYPNYKVIVLNDDFNTFRHVAACVMKYIPNMTSDRAWELTNQVHYEGQAIVWVGPQVQAELYHEQLLRAGLTMAPLEPGGS

SEQ ID NO: 1262 - protein, 95 aa, Thermosynechococcus elongatus
ASVVPQERQQVARKHYPNYKVIVLNDDFNTFRHVAACSMKYIPNMTSDRAWELTNQVHYEGQAIVWVGPQVQAELYHEQLLRAGLTMAPLEPGGS

SEQ ID NO: 1263 - protein, 95 aa, Thermosynechococcus elongatus; identical to SEQ ID NO: 3

SEQ ID NO: 1264 - protein, 95 aa, Thermosynechococcus elongatus
ASVVPQERQQVARKHYPNYKVIVLNDDFNTFRHVAACLKKYIPNMISDRAWELTNQVHYEGQAIVRVGPQEQAELYHKQLLRAGLTMAPLEPEGS

SEQ ID NO: 1265 - protein, 95 aa, Thermosynechococcus elongatus
ASVVPQERQQVARKHYPNYKVIVLNDDFNTFRHVAACLTKYIPNMTSDRAWELTNQVHYEGQAIVWVGPQVQAELYHEQLLRAGLTMAPLEPGGS

SEQ ID NO: 1266 - protein, 95 aa, Thermosynechococcus elongatus
ASVVPQERQQVARKHYPNYKVIVLNDDFNTFRHVAACLMKYTPNMTSDRAWELTNQVHYEGQAIVWVGPQVQAELYHEQLLRAGLTMAPLEPGGS

SEQ ID NO: 1267 - protein, 95 aa, Thermosynechococcus elongatus
ASVVPQERQQVARKHYPNYKVIVLNDDFNTFRHVAACLMKYIQNMTSDRAWELTNQVHYEGQAIVWVGPQVQAELYHEQLLRAGLTMAPLEPEGS

SEQ ID NO: 1268 - protein, 95 aa, Thermosynechococcus elongatus; identical to SEQ ID NO: 21

SEQ ID NO: 1269 - protein, 95 aa, Thermosynechococcus elongatus; identical to SEQ ID NO: 520

SEQ ID NO: 1270 - protein, 95 aa, Thermosynechococcus elongatus
ASVVPQERQQVARKHYPNYKVIVLNDDFNTFRHVAACLMKYIPNKTSDRAWELTNQVHYEGQAIVWVGPQEQAELYHEQLLRAGLTRAPLEPEGS

SEQ ID NO: 1271 - protein, 90 aa, Thermosynechococcus elongatus
ASVVPQERQQVARKHYPNYKVIVLNDDFNTFRHVAACLMKYIPNKTSDRAWELTNQVHYEGQAIVWVGPQEQAELYHEQLLRAGLTMAPL

SEQ ID NO: 1272 - protein, 95 aa, Thermosynechococcus elongatus
ASVVPQERQQVARKHYPNYKVIVLNDDFNTFRHVAACLMKYIPNKTSDRAWELTNQVHYEGQAIVWVGPQEQAELFHEQLLRAGLTMAPLEPEGS

SEQ ID NO: 1273 - protein, 95 aa, Thermosynechococcus elongatus
ASVVPQERQQVARKHYPNYKVIVLNDDFNTFRHVAACLMKYIPNKTSDRAWELTNQVHYEGRAIVWVGPQEQAELYHEQLLRAGLTMAPLEPEGS

SEQ ID NO: 1274 - protein, 95 aa, Thermosynechococcus elongatus
ASVVPQERQQVARKHYPNYKVIVLNDDFNTFRHVAACLMKYIPNTTSDRAWELTNQVHYEGQAIVWVGPQVQAELYHEQLLRAGLTMAPLEPEGS

SEQ ID NO: 1275 - protein, 95 aa, Thermosynechococcus elongatus; identical to SEQ ID NO: 3

SEQ ID NO: 1276 - protein, 95 aa, Thermosynechococcus elongatus
ASVVPQERQQVARKHYPNYKVIVLNDDFNTFRHVAACLMKYIPNMTSDRARELTNQVHYEGQAIVWVGPQVQAELYHEQLLRAGLTMAPLEPGGS

SEQ ID NO: 1277 - protein, 95 aa, Thermosynechococcus elongatus; identical to SEQ ID NO: 895

SEQ ID NO: 1278 - protein, 95 aa, Thermosynechococcus elongatus
ASVVPQERQQVARKHYPNYKVIVLNDDFNTFRHVAACLMKYIPNMTSDRAWELTNQVHDEGQAIVWVGPQVQAELYHEQLLRAGLTMAPLEPGGS

SEQ ID NO: 1279 - protein, 58 aa, Thermosynechococcus elongatus; identical to SEQ ID NO: 874

SEQ ID NO: 1280 - protein, 95 aa, Thermosynechococcus elongatus; identical to SEQ ID NO: 35

SEQ ID NO: 1281 - protein, 95 aa, Thermosynechococcus elongatus
ASVVPQERQQVARKHYPNYKVIVLNDDFNTFRHVAACLMKYIPNMTSDRAWELTNQVHYEGQTIVWVGPQEQAELYHEQLLRAGLTMAPLEPEGS

SEQ ID NO: 1282 - protein, 95 aa, Thermosynechococcus elongatus; identical to SEQ ID NO: 6

SEQ ID NO: 1283 - protein, 95 aa, Thermosynechococcus elongatus; identical to SEQ ID NO: 6

SEQ ID NO: 1284 - protein, 95 aa, Thermosynechococcus elongatus
ASVVPQERQQVARKHYPNYKVIVLNDDFNTFRHVAACLMKYIPNMTSDRAWELTNQVHYEGQAIVWVSPQVQAELYHEQLLRAGLTMAPLEPGGS

SEQ ID NO: 1285 - protein, 95 aa, Thermosynechococcus elongatus
ASVVPQERQQVARKHYPNYKVIVLNDDFNTFRHVAACLMKYIPNMTSDRAWELTNQVHYEGQAIVWVGPKVQAELYHEQLLRAGLTMAPLEPGGS

SEQ ID NO: 1286 - protein, 95 aa, Thermosynechococcus elongatus
ASVVPQERQQVARKHYPNYKVIVLNDDFNTFRHVAACLMKYIPNMTSDRAWELTNQVHYEGQAIVWVGPQEQAELYHKQLLRAGLTMAPLEPEGS

SEQ ID NO: 1287 - protein, 95 aa, Thermosynechococcus elongatus
ASVVPQERQQVARKHYPNYKVIVLNDDFNTFRHVAACLMKYIPNMTSDRAWELTNQVHYEGQAIVWVGPQEQAELYHEKLLRAGLTMAPLEPEGS

SEQ ID NO: 1288 - protein, 90 aa, Thermosynechococcus elongatus
ASVVPQERQQVARKHYPNYKVIVLNDDFNTFRHVAACLMKYIPNMTSDRAWELTNQVHYEGQAIVWVGPQEQAELYHEQLLRAGLTMAPL

SEQ ID NO: 1289 - protein, 95 aa, Thermosynechococcus elongatus; identical to SEQ ID NO: 6

SEQ ID NO: 1290 - protein, 95 aa, Thermosynechococcus elongatus
ASVVPQERQQVARKHYPNYKVIVLNDDFNTFRHVAACLMKYIPNMTSDRAWELTNQVHYEGQAIVWVGPQEQAELYHEQLLRAGLTMALLEPEGS

SEQ ID NO: 1291 - protein, 95 aa, Thermosynechococcus elongatus
ASVVPQERQQVARKHYPNYKVIVLNDDFNTFRHVAACLMKYIPNMTSDRAWELTNQVHYEGQAIVWVGPQVQAELYNEQLLRAGLTMAPLEPGGS

SEQ ID NO: 1292 - protein, 95 aa, Thermosynechococcus elongatus; identical to SEQ ID NO: 3

SEQ ID NO: 1293 - protein, 79 aa, Thermosynechococcus elongatus
ASVVPQERQQVARKHYPNYKVIVLNDDFNTFRHVAACLMKYIPNMTSDRAWELTNQVHYEGQAIVWVGPQVQAELYHEQ

SEQ ID NO: 1294 - protein, 95 aa, Thermosynechococcus elongatus; identical to SEQ ID NO: 9

SEQ ID NO: 1295 - protein, 95 aa, Thermosynechococcus elongatus
ASVVPQERQQVARKHYPNYKVIVLNDDFNTFRHVAACLMKYIPNMTSDRAWELTNQVHYEGQAIVWVGPQVQAELYHEQLLRAGLTMTPLEPGGS

SEQ ID NO: 1296 - protein, 95 aa, Thermosynechococcus elongatus
ASVVPQERQQVARKHYPNYKVIVLNDDFNTFRHVAACLMKYIPNMTSDRAWELTNQVHYEGQAIVWVGPQVQAELYHEQLLRAGLTMAPSEPEGS

SEQ ID NO: 1297 - protein, 95 aa, Thermosynechococcus elongatus
ASVVPQERQQVARKHYPNYKVIVLNDDFNTFRHVAACLMKYIPNMTSDRAWELTNQVHYEGQAIVWVGPQVQAELYHEQLLRAGLTMAPLEQGGS

SEQ ID NO: 1298 - protein, 95 aa, Thermosynechococcus elongatus
ASVVPQERQQVARKHYPNYKVIVLNDDFNTFRHVAACLMKYIPNMTSDRAWELTNQVHYEGQAIVWVGPQVQAELYHEQLLRAGLTMAPLEREGS

SEQ ID NO: 1299 - protein, 95 aa, Thermosynechococcus elongatus
ASVVPQERQQVARKHYPNYKVIVLNDDFNTFRHVAACLMKYIPNMTSDRAWELTNQVHYEGQAIVWVGPQVQAELYHEQLLRAGLTMAPLDPGGS

SEQ ID NO: 1300 - protein, 95 aa, Thermosynechococcus elongatus
ASVVPQERQQVARKHYPNYKVIVLNDDFNTFRHVAACLMKYIPNMTSDRAWELTNQVHYEGQAIVWVGPQVQAELYHEQLLRAGLTMALLEPGGS

SEQ ID NO: 1301 - protein, 95 aa, Thermosynechococcus elongatus
ASVVPQERQQVARKHYPNYKVIVLNDDFNTFRHVAACLMKYIPNMTSDRAWELTNQVHYEGQAIVWVGPQVQAELYHEQLLRAGLTMSPLEPGGS

SEQ ID NO: 1302 - protein, 95 aa, Thermosynechococcus elongatus
ASVVPQERQQVARKHYPNYKVIVLNDDFNTFRHVAACLMKYIPNMTSDRAWELTNQVHYEGQAIVWVGPQVQAELYHEQLLRAGLSMAPLEPEGS

SEQ ID NO: 1303 - protein, 95 aa, Thermosynechococcus elongatus
ASVVPQERQQVARKHYPNYKVIVLNDDFNTFRHVAACLMKYIPNMTSDRAWELTNQVHYEGQAIVWVGPQVQAELYHEQLLSAGLTMAPLEPGGS

SEQ ID NO: 1304 - protein, 95 aa, Thermosynechococcus elongatus; identical to SEQ ID NO: 673

SEQ ID NO: 1305 - protein, 95 aa, Thermosynechococcus elongatus
ASVVPQERQQVARKHYPNYKVIVLNDDFNTFRHVAACLMKYIPNMTSDRAWELTNQVHYEGQAIVWVGPQVQAELYHELLLRAGLTMAPLEPGGS

SEQ ID NO: 1306 - protein, 95 aa, Thermosynechococcus elongatus
ASVVPQERQQVARKHYPNYKVIVLNDDFNTFRHVAACLMKYIPNMTSDRAWELTNQVHYEGQAIVWVGPQVQAELYHDQLLRAGLTMAPLEPGGS

SEQ ID NO: 1307 - protein, 95 aa, Thermosynechococcus elongatus; identical to SEQ ID NO: 3

SEQ ID NO: 1308 - protein, 95 aa, Thermosynechococcus elongatus
ASVVPQERQQVARKHYPNYKVIVLNDDFNTFRHVAACLMKYIPNMTSDRAWELTNQVHYEGQAIVWVGPQVQAELSHEQLLRAGLTMAPLEPGGS

SEQ ID NO: 1309 - protein, 95 aa, Thermosynechococcus elongatus
ASVVPQERQQVARKHYPNYKVIVLNDDFNTFRHVAACLMKYIPNMTSDRAWELTNQVHYEGQAIVWVGPQVQAELCHEQLLRAGLTMAPLEPGGS

SEQ ID NO: 1310 - protein, 95 aa, Thermosynechococcus elongatus
ASVVPQERQQVARKHYPNYKVIVLNDDFNTFRHVAACLMKYIPNMTSDRAWELTNQVHYEGQAIVWVGPQVQADLYHEQLLRAGLTMAPLEPGGS

SEQ ID NO: 1311 - protein, 95 aa, Thermosynechococcus elongatus
ASVVPQERQQVARKHYPNYKVIVLNDDFNTFRHVAACLMKYIPNMTSDRAWELTNQVHYEGQAIVWVGPQVQAVLYHEQLLRAGLTMAPLEPGGS

SEQ ID NO: 1312 - protein, 73 aa, Thermosynechococcus elongatus
ASVVPQERQQVARKHYPNYKVIVLNDDFNTFRHVAACLMKYIPNMTSDRAWELTNQVHYEGQAIVWVGPQVQA

SEQ ID NO: 1313 - protein, 95 aa, Thermosynechococcus elongatus
ASVVPQERQQVARKHYPNYKVIVLNDDFNTFRHVAACLMKYIPNMTSDRAWELTNQVHYEGQAIVWVGPQVQSELYHEQLLRAGLTMAPLEPEGS

SEQ ID NO: 1314 - protein, 95 aa, Thermosynechococcus elongatus; identical to SEQ ID NO: 3

SEQ ID NO: 1315 - protein, 95 aa, Thermosynechococcus elongatus; identical to SEQ ID NO: 3

SEQ ID NO: 1316 - protein, 95 aa, Thermosynechococcus elongatus; identical to SEQ ID NO: 3

SEQ ID NO: 1317 - protein, 95 aa, Thermosynechococcus elongatus
ASVVPQERQQVARKHYPNYKVIVLNDDFNTFRHVAACLMKYIPNMTSDRAWELTNQVHYEGQAIVWVGLQVQAELYHEQLLRAGLTMAPLEPGGS

SEQ ID NO: 1318 - protein, 95 aa, Thermosynechococcus elongatus
ASVVPQERQQVARKHYPNYKVIVLNDDFNTFRHVAACLMKYIPNMTSDRAWELTNQVHYEGQAIVWFGPQVQAELYHEQLLRAGLTMAPLEPGGS

SEQ ID NO: 1319 - protein, 95 aa, Thermosynechococcus elongatus
ASVVPQERQQVARKHYPNYKVIVLNDDFNTFRHVAACLMKYIPNMTSDRAWELTNQVHYEGQAIVLVGPQVQAELYHEQLLRAGLTMAPLEPEGS

SEQ ID NO: 1320 - protein, 95 aa, Thermosynechococcus elongatus; identical to SEQ ID NO: 1319

SEQ ID NO: 1321 - protein, 95 aa, Thermosynechococcus elongatus; identical to SEQ ID NO: 3

SEQ ID NO: 1322 - protein, 95 aa, Thermosynechococcus elongatus; identical to SEQ ID NO: 3

SEQ ID NO: 1323 - protein, 95 aa, Thermosynechococcus elongatus; identical to SEQ ID NO: 207

SEQ ID NO: 1324 - protein, 95 aa, Thermosynechococcus elongatus
ASVVPQERQQVARKHYPNYKVIVLNDDFNTFRHVAACLMKYIPNMTSDRAWELTNQVHYEGLAIVWVGPQEQAELYHEQLLRAGLTMAPLEPEGS

SEQ ID NO: 1325 - protein, 95 aa, Thermosynechococcus elongatus
ASVVPQERQQVARKHYPNYKVIVLNDDFNTFRHVAACLMKYIPNMTSDRAWELTNQVHYDGQAIVWVGPQVQAELYHEQLLRAGLTMAPLEPEGS

SEQ ID NO: 1326 - protein, 95 aa, Thermosynechococcus elongatus; identical to SEQ ID NO: 3

SEQ ID NO: 1327 - protein, 95 aa, Thermosynechococcus elongatus
ASVVPQERQQVARKHYPNYKVIVLNDDFNTFRHVAACLMKYIPNMTSDRAWELTNQVHYGGQAIVWVGPQVQAELYHEQLLRAGLTMAPLEPGGS

SEQ ID NO: 1328 - protein, 95 aa, Thermosynechococcus elongatus
ASVVPQERQQVARKHYPNYKVIVLNDDFNTFRHVAACLMKYIPNMTSDRAWELTNQVHYGGRAIVWVGPQEQAELYHEQLLRAGLTMAPLEPGGS

SEQ ID NO: 1329 - protein, 95 aa, Thermosynechococcus elongatus
ASVVPQERQQVARKHYPNYKVIVLNDDFNTFRHVAACLMKYIPNMTSDRAWELTNQVHYGGRAIVWVGPQVQAELYHEQLLRAGLTMAPLEPGGS

SEQ ID NO: 1330 - protein, 95 aa, Thermosynechococcus elongatus
ASVVPQERQQVARKHYPNYKVIVLNDDFNTFRHVAACLMKYIPNMTSDRAWELTNQVHYVGQAIVWVGPQEQAELYHEQLLRAGLTMAPLEPEGS

SEQ ID NO: 1331 - protein, 95 aa, Thermosynechococcus elongatus
ASVVPQERQQVARKHYPNYKVIVLNDDFNTFRHVAACLMKYIPNMTSDRAWELTNQVHSEGQAIVWVGPQVQAELYHEQLLRAGLTMAPLEPGGS

SEQ ID NO: 1332 - protein, 95 aa, Thermosynechococcus elongatus
ASVVPQERQQVARKHYPNYKVIVLNDDFNTFRHVAACLMKYIPNMTSDRAWELTNQVLYEGQAIVWVGPQVQAELYHEQLLRAGLTMAPLEPGGS

SEQ ID NO: 1333 - protein, 95 aa, Thermosynechococcus elongatus
ASVVPQERQQVARKHYPNYKVIVLNDDFNTFRHVAACLMKYIPNMTSDRAWELTNQVYYEGQAIVWVGPQVQAELYHEQLLRAGLTMAPLEPGGS

SEQ ID NO: 1334 - protein, 95 aa, Thermosynechococcus elongatus
ASVVPQERQQVARKHYPNYKVIVLNDDFNTFRHVAACLMKYIPNMTSDRAWELTNHVHYEGQAIVWVGPQEQAELYHEQLLRAGLTMAPLEPEGS

SEQ ID NO: 1335 - protein, 95 aa, Thermosynechococcus elongatus
ASVVPQERQQVARKHYPNYKVIVLNDDFNTFRHVAACLMKYIPNMTSDRAWELTDQVHYEGQAIVWVGPQVQAELYHEQLLRAGLTMAPLEPGGS

SEQ ID NO: 1336 - protein, 95 aa, Thermosynechococcus elongatus
ASVVPQERQQVARKHYPNYKVIVLNDDFNTFRHVAACLMKYIPNMTSDRAWEFTNQVHYEGQAIVWVGPQEQAELYHEQLLRAGLTMAPLEPEGS

SEQ ID NO: 1337 - protein, 95 aa, Thermosynechococcus elongatus; identical to SEQ ID NO: 3

SEQ ID NO: 1338 - protein, 95 aa, Thermosynechococcus elongatus
ASVVPQERQQVARKHYPNYKVIVLNDDFNTFRHVAACLMKYIPNMTSDRAWGLTNQVHYEGQAIVWVGPQVQAELYHEQLLRAGLTMAPLEPGGS

SEQ ID NO: 1339 - protein, 95 aa, Thermosynechococcus elongatus
ASVVPQERQQVARKHYPNYKVIVLNDDFNTFRHVAACLMKYIPNMTSDRALELTNQVHYEGQAIVWVGPQVQAELYHEQLLRAGLTMAPLEPEGS

SEQ ID NO: 1340 - protein, 95 aa, Thermosynechococcus elongatus
ASVVPQERQQVARKHYPNYKVIVLNDDFNTFRHVAACLMKYIPNMISDRAWELTNQVHYGGRAIVWVGPQEQAELYHEQLLRVGLTMAPLEPEGS

SEQ ID NO: 1341 - protein, 95 aa, Thermosynechococcus elongatus
ASVVPQERQQVARKHYPNYKVIVLNDDFNTFRHVAACLMKYIPNMASDRAWELTNQVHYEGQAIVWVGPQVQAELYHEQLLRAGLTMAPLEPGGS

SEQ ID NO: 1342 - protein, 95 aa, Thermosynechococcus elongatus
ASVVPQERQQVARKHYPNYKVIVLNDDFNTFRHVAACLMKYIPNVTSDRAWELTNQVHYEGQAIVWVGPQVQAELYHEQLLRAGLTMAPLEPGGS

SEQ ID NO: 1343 - protein, 95 aa, Thermosynechococcus elongatus
ASVVPQERQQVARKHYPNYKVIVLNDDFNTFRHVAACLMKYIPNMTSDRAWELTNQVHYNGQAIVWVGPQVQAELYHEQLLRAGLTMAPLEPGGS

SEQ ID NO: 1344 - protein, 95 aa, Thermosynechococcus elongatus; identical to SEQ ID NO: 54

SEQ ID NO: 1345 - protein, 95 aa, Thermosynechococcus elongatus
ASVVPQERQQVARKHYPNYKVIVLNDDFNTFRHVAACLMKYIPTMTSDRAWELTNQVHYEGQAIVWVGPQVQAELYHEQLLRAGLTMAPLEPGGS

SEQ ID NO: 1346 - protein, 95 aa, Thermosynechococcus elongatus
ASVVPQERQQVARKHYPNYKVIVLNDDFNTFRHVAACLMKYIPDMTSDRAWELTNQVHYEGQAIVWVGPQVQAELYHEQLLRAGLTMAPLEPGGS

SEQ ID NO: 1347 - protein, 95 aa, Thermosynechococcus elongatus
ASVVPQERQQVARKHYPNYKVIVLNDDFNTFRHVAACLMKYIANMTSDRAWELTNQVHYEGQAIVWVGPQVQAELYHEQLLRAGLTMAPLEPGGS

SEQ ID NO: 1348 - protein, 95 aa, Thermosynechococcus elongatus
ASVVPQERQQVARKHYPNYKVIVLNDDFNTFRHVAACLMKYFPNMTSDRAWELTNQVHYEGQAIVWVGPQVQAELYHEQLLRAGLTMAPLEPGGS

SEQ ID NO: 1349 - protein, 95 aa, Thermosynechococcus elongatus
ASVVPQERQQVARKHYPNYKVIVLNDDFNTFRHVAACFMKYIPNMTSDRAWELTNQVHYEGQAIVWVGPQVQAELYHEQLLRAGLTMAPLEPEGS

SEQ ID NO: 1350 - protein, 95 aa, Thermosynechococcus elongatus
ASVVPQERQQVARKHYPNYKVIVLNDDFNTFRHVAAWLMKYIPNMTSDRAWELTNQVHYEGQAIVWVGPQVQAELYHEQLLRAGLTMAPLEPGGS

SEQ ID NO: 1351 - protein, 95 aa, Thermosynechococcus elongatus
ASVVPQERQQVARKHYPNYKVIVLNDDFNTFRHVAAFLMKYIPNMTSDRAWELTNQVHYEGQAIVWVGPQEQAELYHEQLLRAGLTMAPLEPEGS

SEQ ID NO: 1352 - protein, 95 aa, Thermosynechococcus elongatus
ASVVPQERQQVARKHYPNYKVIVLNDDFNTFRHVAAFLMKYIPNMTSDRAWELTNQVHYEGQAIVWVGPQVQAELYHEQLLRAGLTMAPLEPGGS

SEQ ID NO: 1353 - protein, 95 aa, Thermosynechococcus elongatus; identical to SEQ ID NO: 3

SEQ ID NO: 1354 - protein, 95 aa, Thermosynechococcus elongatus
ASVVPQERQQVARKHYPNYKVIVLNDDFNTFRHVASCLMKYIPNMTSDRAWELTNQVHYEGQAIVWVGPQVQAELYHEQLLRAGLTMAPLEPGGS

SEQ ID NO: 1355 - protein, 95 aa, Thermosynechococcus elongatus
ASVVPQERQQVARKHYPNYKVIVLNDDFNTFRHVVACLKKYIPNMISDRAWELTNQVHYGGRAIVWVGPQEQAELYHEQLLRAGLTMAPLEPGGS

SEQ ID NO: 1356 - protein, 95 aa, Thermosynechococcus elongatus
ASVVPQERQQVARKHYPNYKVIVLNDDFNTFRHFAACLMKYIPNMTSDRAWELTNQVHYEGQAIVWVGPQEQAELYHEQLLRAGLTMAPLEPEGS

SEQ ID NO: 1357 - protein, 95 aa, Thermosynechococcus elongatus
ASVVPQERQQVARKHYPNYKVIVLNDDFNTFRLVAACLMKYIPNMTSDRAWELTNQVHYEGQAIVWVGPQVQAELYHEQLLRAGLTMAPLEPGGS

SEQ ID NO: 1358 - protein, 95 aa, Thermosynechococcus elongatus
ASVVPQERQQVARKHYPNYKVIVLNDDFNTFLHVAACLMKYIPNMTSDRAWELTNQVHYEGQAIVWVGPQEQAELYHEQLLRAGLTMAPLEPEGS

SEQ ID NO: 1359 - protein, 31 aa, Thermosynechococcus elongatus
ASVVPQERQQVARKHYPNYKVIVLNDDFNTF

SEQ ID NO: 1360 - protein, 95 aa, Thermosynechococcus elongatus
ASVVPQERQQVARKHYPNYKVIVLNDDFNSFRHVAACLMKYIPNMTSDRAWELTNQVHYEGQAIVWVGPQVQAELYHEQLLRAGLTMAPLEPGGS

SEQ ID NO: 1361 - protein, 95 aa, Thermosynechococcus elongatus; identical to SEQ ID NO: 3

SEQ ID NO: 1362 - protein, 95 aa, Thermosynechococcus elongatus
ASVVPQERQQVARKHYPNYKVIVLNDDFDTFRHVAACLMKYIPNMTSDRAWELTNQVHYEGQAIVWVGPQVQAELYHEQLLRAGLTMAPLEPGGS

SEQ ID NO: 1363 - protein, 95 aa, Thermosynechococcus elongatus
ASVVPQERQQVARKHYPNYKVIVLNDDFYTFRHVAACLMKYIPNMTSDRAWELTNQVHYEGQAIVWVGPQVQAELYHEQLLRAGLTMAPLEPGGS

SEQ ID NO: 1364 - protein, 95 aa, Thermosynechococcus elongatus
ASVVPQERQQVARKHYPNYKVIVLNDGFNTFRHVAACLMKYIPNMTSDRAWELTNQVHYEGQAIVWVGPQVQAELYHEQLLRAGLTMAPLEPGGS

SEQ ID NO: 1365 - protein, 95 aa, Thermosynechococcus elongatus
ASVVPQERQQVARKHYPNYKVIVLNDYFNTFRHVAACLMKYIPNMTSDRAWELTNQVHYEGQAIVWVGPQEQAELYHEQLLRAGLTMAPLEPEGS

SEQ ID NO: 1366 - protein, 95 aa, Thermosynechococcus elongatus
ASVVPQERQQVARKHYPNYKVIVLNDYFNTFRHVAACLMKYIPNMTSDRAWELTNQVHYEGQAIVWVGPQVQAELYHEQLLRAGLTMAPLEPEGS

SEQ ID NO: 1367 - protein, 95 aa, Thermosynechococcus elongatus
ASVVPQERQQVARKHYPNYKVIVLNEDFNTFRHVAACLMKYIPNMTSDRAWELTNQVHYEGQAIVWVGPQVQAELYHEQLLRAGLTMAPLEPGGS

SEQ ID NO: 1368 - protein, 95 aa, Thermosynechococcus elongatus
ASVVPQERQQVARKHYPNYKVIVLNVDFNTFRHVAACLMKYIPNMTSDRAWELTNQVHYEGQAIVWVGPQVQAELYHEQLLRAGLTMAPLEPGGS

SEQ ID NO: 1369 - protein, 95 aa, Thermosynechococcus elongatus
ASVVPQERQQVARKHYPNYKVIVLNYDFNTFRHVAACLMKYIPNMTSDRAWELTNQVHYEGQAIVWVGPQVQAELYHEQLLRAGLTMAPLEPGGS

SEQ ID NO: 1370 - protein, 95 aa, Thermosynechococcus elongatus
ASVVPQERQQVARKHYPNYKVIVLDDDFNTFRHVAACLMKYIPNMTSDRAWELTNQVHYEGQAIVWVGPQVQAELYHEQLLRAGLTMAPLEPGGS

SEQ ID NO: 1371 - protein, 95 aa, Thermosynechococcus elongatus
ASVVPQERQQVARKHYPNYNVIVLNDDFNTFRHVAACLMKYIPNMTSDRAWELTNQVHYEGQAIVWVGPQVQAELYHEQLLRAGLTMAPLEPEGS

SEQ ID NO: 1372 - protein, 95 aa, Thermosynechococcus elongatus
ASVVPQERQQVARKHYPNYRVIVLNDDFNTFRHVAACLMKYIPNMTSDRAWELTNQVHYEGQAIVWVGPQEQAELYHEQLLRAGLTMAPLEPEGS

SEQ ID NO: 1373 - protein, 95 aa, Thermosynechococcus elongatus
ASVVPQERQQVARKHYPNSKGIVLNDDFNTFRHVAACLMKYIPNMTSDRAWELTNQVHYEGQAIVWVGPQVQAELYHEQLLRAGLTMAPLEPGGS

SEQ ID NO: 1374 - protein, 95 aa, Thermosynechococcus elongatus
ASVVPQERQQVARKHYPIYKVIVLNDDFNTFRHVAACLMKYIPNMTSDRAWELTNQVHYEGQAIVWVGPQVQAELYHEQLLRAGLTMAPLEPGGS

SEQ ID NO: 1375 - protein, 95 aa, Thermosynechococcus elongatus
ASVVPQERQQVARKLYPNYKVIVLNDDFNTFRHVAACLMKYIPNMTSDRAWELTNQVHYEGQAIVWVGPQVQAELYHEQLLRAGLTMAPLEPGGS

SEQ ID NO: 1376 - protein, 95 aa, Thermosynechococcus elongatus
ASVVPQERQQVARQHYPNYKVIVLNDDFNTFRHVAACLMKYIPNMTSDRAWELTNQVHYEGQAIVWVGPQVQAELYHEQLLRAGLTMAPLEPEGS

SEQ ID NO: 1377 - protein, 95 aa, Thermosynechococcus elongatus
ASVVPQERQQVASKHYPNYKVIVLNDDFNTFRHVAACLMKYIPNMTSDRAWELTNQVHYEGQAIVWVGPQEQAELYHEQLLRAGLTMAPLEPEGS

SEQ ID NO: 1378 - protein, 95 aa, Thermosynechococcus elongatus
ASVVPQERQQVASKHYPNYKVIVLNDDFNTFRHVAACLMKYIPNMTSDRAWELTNQVHYEGQAIVWVGPQVQAELYHEQLLRAGLTMAPLEPGGS

SEQ ID NO: 1379 - protein, 95 aa, Thermosynechococcus elongatus
ASVVPQERQQVAIKHYPNYKVIVLNDDFNTFRHVAACLMKYIPNMTSDRAWELTNQVHYEGQAIVWVGPQVQAELYHEQLLRAGLTMAPLEPEGS

SEQ ID NO: 1380 - protein, 95 aa, Thermosynechococcus elongatus
ASVVPQERQQVVRKHYPNYKVIVLNDDFNTFRHVAACLMKYIPNMTSDRAWELTNQVHYEGQAIVWVGPQVQAELYHEQLLRAGLTMAPLEPGGS

SEQ ID NO: 1381 - protein, 95 aa, Thermosynechococcus elongatus
ASVVPQERQQFARKHYPNYKVIVLNDDFNTFRHVAACLMKYIPNMTSDRAWELTNQVHYEGQAIVWVGPQVQAELYHEQLLRAGLTMAPLEPGGS

SEQ ID NO: 1382 - protein, 95 aa, Thermosynechococcus elongatus; identical to SEQ ID NO: 3

SEQ ID NO: 1383 - protein, 95 aa, Thermosynechococcus elongatus
ASVVPQERHQVARKHYPNYKVIVLNDDFNTFRHVAACLMKYIPNMTSDRAWELTNQVHYEGQAIVWVGPQVQAELYHEQLLRAGLTMAPLEPGGS

SEQ ID NO: 1384 - protein, 95 aa, Thermosynechococcus elongatus
ASVVPQERQKDTRKHYPNYKVIVLNDDFNTFRHVAACLMKYIPNMTSDRAWELTNQVHYEGQAIVWVGPQEQAELYHEQLLRAGLTMAPLEPEGS

SEQ ID NO: 1385 - protein, 95 aa, Thermosynechococcus elongatus
ASVVPQERQKVTRKHYPNYKVIVLNDDFNTFQHVVACLKKYIPNMISDRAWELTNQVHYGGRAIVWVGPQEQAELYHEQLLRAGLTMAPLEPEGS

SEQ ID NO: 1386 - protein, 95 aa, Thermosynechococcus elongatus; identical to SEQ ID NO: 2

SEQ ID NO: 1387 - protein, 95 aa, Thermosynechococcus elongatus; identical to SEQ ID NO: 4

SEQ ID NO: 1388 - protein, 95 aa, Thermosynechococcus elongatus; identical to SEQ ID NO: 4

SEQ ID NO: 1389 - protein, 95 aa, Thermosynechococcus elongatus; identical to SEQ ID NO: 753

SEQ ID NO: 1390 - protein, 95 aa, Thermosynechococcus elongatus
ASVVPQERQQDTRKNYPNYKVIVLNDDFNTFRHVAACLMKYIPNKTSDRAWELTNQVHYEGQAIVWVGPQEQAELYHEQLLRAGLTMAPLEPEGS

SEQ ID NO: 1391 - protein, 95 aa, Thermosynechococcus elongatus
ASVVPQERQQDTRKHNPNYKVIVLNDDFNTFRHVAACLMKYIPNKTSDRAWELTNQVHYEGQAIVWVGPQEQAELYHEQLLRAGLTMAPLEPEGS

SEQ ID NO: 1392 - protein, 95 aa, Thermosynechococcus elongatus
ASVVPQERQQDTRKHHPNYKVIVLNDDFNTFRHVAACLMKYIPNKTSDRAWELTNQVHYEGQAIVWVGPQEQAELYHEQLLRAGLTMAPLEPEGS

SEQ ID NO: 1393 - protein, 15 aa, Thermosynechococcus elongatus
ASVVPQERQQDTRKH

SEQ ID NO: 1394 - protein, 95 aa, Thermosynechococcus elongatus
ASVVPQERQQDTRKHYTNYKVIVLNDDFNTFRHVAACLMKYIPNKTSDRAWELTNQVHYEGQAIVWVGPQEQAELYHEQLLRAGLTMAPLEPEGS

SEQ ID NO: 1395 - protein, 95 aa, Thermosynechococcus elongatus
ASVVPQERQQDTRKHYTNYKVIVLNDDFNTFRHVAACLMKYIPNMTSDRAWELTNQVHYEGQAIVWVGPQEQAELYHEQLLRAGLTMAPLEPEGS

SEQ ID NO: 1396 - protein, 95 aa, Thermosynechococcus elongatus
ASVVPQERQQDTRKHYQNYKVIVLNDDFNTFRHVAACLMKYIPNMTSDRAWELTNQVHYEGQAIVWVGPQVQAELYHEQLLRAGLTMAPLEPGGS

SEQ ID NO: 1397 - protein, 95 aa, Thermosynechococcus elongatus
ASVVPQERQQDTRKHYPKYKVIVLNDDFNTFRHVAACLMKYIPNMTSDRAWELTNQVHYEGQAIVWVGPQEQAELYHEQLLRAGLTMAPLEPEGS

SEQ ID NO: 1398 - protein, 95 aa, Thermosynechococcus elongatus; identical to SEQ ID NO: 4

SEQ ID NO: 1399 - protein, 95 aa, Thermosynechococcus elongatus; identical to SEQ ID NO: 7

SEQ ID NO: 1400 - protein, 95 aa, Thermosynechococcus elongatus; identical to SEQ ID NO: 2

SEQ ID NO: 1401 - protein, 95 aa, Thermosynechococcus elongatus; identical to SEQ ID NO: 920

SEQ ID NO: 1402 - protein, 95 aa, Thermosynechococcus elongatus
ASVVPQERQQDTRKHYPNYKVRVLNDDFNTFRHVAACLMKYIPNMTSDRAWELTNQVHYEGQAIVWVGPQVQAELYHEQLLRAGLTMAPLEPGGS

SEQ ID NO: 1403 - protein, 95 aa, Thermosynechococcus elongatus
ASVVPQERQQDTRKHYPNYKVIILNDDFNTFQHVAACLMKYIPNMTSDRAWELTNQVHYEGQAIVRVGPQEQAELNHEQLLRAGLTMAPLEPEGS

SEQ ID NO: 1404 - protein, 95 aa, Thermosynechococcus elongatus
ASVVPQERQQDTRKHYPNYKVIILNDDFNTFQHVAACLMKYIPNMTSDRAWELTNQVHYEGQAIVRVGPQEQAELYHKQVLRAGLTMAPLEPEGS

SEQ ID NO: 1405 - protein, 81 aa, Thermosynechococcus elongatus
ASVVPQERQQDTRKHYPNYKVIILNDDFNTFQHVAACLMKYIPNMTSDRAWELTNQVHYEGQAIVRVGPQEQAELYHKQLL

SEQ ID NO: 1406 - protein, 95 aa, Thermosynechococcus elongatus
ASVVPQERQQDTRKHYPNYKVIILNDDFNTFQHVAACLMKYIPNMTSDRAWELTNQVHYEGQAIVRVGPQVQAELYHEQLLRAGLTMAPLEPGGS

SEQ ID NO: 1407 - protein, 95 aa, Thermosynechococcus elongatus
ASVVPQERQQDTRKHYPNYKVIILNDDFNTFQHVAACLMKYIPNMTSDRAWELTNQVHYEGQAIVWVGPQEQAELYHEQLLRTGLTMAPLEPEGS

SEQ ID NO: 1408 - protein, 95 aa, Thermosynechococcus elongatus
ASVVPQERQQDTRKHYPNYKVIILNDDFNTFQHVAACLMKYIPNMTSDRAWELTNQVHYEGRAIVWVGPQEQAELYHEQLLRAGLTMAPLEPEGS

SEQ ID NO: 1409 - protein, 95 aa, Thermosynechococcus elongatus
ASVVPQERQQDTRKHYPNYKVIILNDDFNTFQHVAACLMKYIPNMTSDRAWELTNQVHYVGQAIVWVGPQERAELYHEQLLRAGLTMAPLEPEGS

SEQ ID NO: 1410 - protein, 95 aa, Thermosynechococcus elongatus
ASVVPQERQQDTRKHYPNYKVIILNDDFNTFQHVAACLMKYIPNMISDRAWELTNQVHYGGRAIVWVGPQEQAELYHEQLLRAGLTMAPLEPEGS

SEQ ID NO: 1411 - protein, 95 aa, Thermosynechococcus elongatus
ASVVPQERQQDTRKHYPNYKVIILNDDFNTFQHVAACFMKYIPNMTSDRAWELTNQVHYEGQAIVWVGPQEQAELYHEQLLRAGLTMAPLEPEGS

SEQ ID NO: 1412 - protein, 95 aa, Thermosynechococcus elongatus
ASVVPQERQQDTRKHYPNYKVIILNDDFNTFRHVAACLMKYIPNKTSDRAWELTNQVHYEGQAIVWVGPQEQAELYHEQLLRAGLTMAPLEPEGS

SEQ ID NO: 1413 - protein, 95 aa, Thermosynechococcus elongatus; identical to SEQ ID NO: 289

SEQ ID NO: 1414 - protein, 95 aa, Thermosynechococcus elongatus
ASVVPQERQQDTRKHYPNYKVIILNDDFNTFRHVAACLMKYIPNMTSDRAWELTNQVHYVGQAIVWVGPQEQAELYHEQLLRAGLTMAPLEPEGS

SEQ ID NO: 1415 - protein, 95 aa, Thermosynechococcus elongatus; identical to SEQ ID NO: 2

SEQ ID NO: 1416 - protein, 95 aa, Thermosynechococcus elongatus; identical to SEQ ID NO: 4

SEQ ID NO: 1417 - protein, 95 aa, Thermosynechococcus elongatus; identical to SEQ ID NO: 7

SEQ ID NO: 1418 - protein, 95 aa, Thermosynechococcus elongatus; identical to SEQ ID NO: 2

SEQ ID NO: 1419 - protein, 95 aa, Thermosynechococcus elongatus
ASVVPQERQQDTRKHYPNYKVIVLKDDFNTFRHVAACLMKYIPNMTSDRAWELTNQVHYEGQAIVWVGPQEQAELYHEQLLRAGLTMAPLEPEGS

SEQ ID NO: 1420 - protein, 95 aa, Thermosynechococcus elongatus
ASVVPQERQQDTRKHYPNYKVIVLNDNFNTFRHVAACLMKYIPNMTSDRAWELTNQVHYEGQAIVWVGPQEQAELYHEQLLRAGLTMAPLEPEGS

SEQ ID NO: 1421 - protein, 95 aa, Thermosynechococcus elongatus
ASVVPQERQQDTRKHYPNYKVIVLNDEFNTFRHVAACLMKYIPNMTSDRAWELTNQVHYEGQAIVWVGPQEQAELYHEQLLRAGLTMAPLEPEGS

SEQ ID NO: 1422 - protein, 95 aa, Thermosynechococcus elongatus
ASVVPQERQQDTRKHYPNYKVIVLNDDINTFRHVAACLMKYIPNMTSDRAWELTNQVHYEGQAIVWVGPQEQAELYHEQLLRAGLTMAPLEPEGS

SEQ ID NO: 1423 - protein, 95 aa, Thermosynechococcus elongatus
ASVVPQERQQDTRKHYPNYKVIVLNDDYNTFRHVAACLMKYIPNKTSDRAWELTNQVHYEGQAIVWVGPQEQAELYHEQLLRAGLTMAPLEPEGS

SEQ ID NO: 1424 - protein, 95 aa, Thermosynechococcus elongatus
ASVVPQERQQDTRKHYPNYKVIVLNDDLNTFRHVAACLMKYIPNKTSDRAWELTNQVHYEGQAIVWVGPQEQAELYHEQLLRAGLTMAPLEPEGS

SEQ ID NO: 1425 - protein, 95 aa, Thermosynechococcus elongatus; identical to SEQ ID NO: 928

SEQ ID NO: 1426 - protein, 95 aa, Thermosynechococcus elongatus
ASVVPQERQQDTRKHYPNYKVIVLNDDFNNFRHVAACLMKYIPNKTSDRAWELTNQVHYEGQAIVWVGPQEQAELYHEQLLRAGLTMAPLEPEGS

SEQ ID NO: 1427 - protein, 95 aa, Thermosynechococcus elongatus
ASVVPQERQQDTRKHYPNYKVIVLNDDFNTVRHVAACLMKYIPNMTSDRAWELTNQVHYEGQAIVWVGPQEQAELYHEQLLRAGLTMAPLEPEGS

SEQ ID NO: 1428 - protein, 95 aa, Thermosynechococcus elongatus; identical to SEQ ID NO: 4

SEQ ID NO: 1429 - protein, 95 aa, Thermosynechococcus elongatus
ASVVPQERQQDTRKHYPNYKVIVLNDDFNTFQHVAACLMKYIPNMTSDRAWKLTNQVHYEGQAIVWVGPQEQAELYHEQLLRAGLTMAPLEPEGS

SEQ ID NO: 1430 - protein, 95 aa, Thermosynechococcus elongatus
ASVVPQERQQDTRKHYPNYKVIVLNDDFNTFQHVAACLMKYIPNMTSDRAWELTNQVHYEGQAIVRVGPQEQAELYHEQLLRAGLTMAPLEPEGS

SEQ ID NO: 1431 - protein, 95 aa, Thermosynechococcus elongatus
ASVVPQERQQDTRKHYPNYKVIVLNDDFNTFQHVAACLMKYIPNMTSDRAWELTNQVHYEGQAIVWVGPQEQAELYHKQLLRAGLTMAPLEPEGS

SEQ ID NO: 1432 - protein, 95 aa, Thermosynechococcus elongatus
ASVVPQERQQDTRKHYPNYKVIVLNDDFNTFQHVAACLMKYIPNMTSDRAWELTNQVHYVGQAIVWVGPQEQAELYHEQLLRAGLTMAPLEPEGS

SEQ ID NO: 1433 - protein, 95 aa, Thermosynechococcus elongatus
ASVVPQERQQDTRKHYPNYKVIVLNDDFNTFQHVAACLMKYIPNMTSDRAWELTNQVHYKGQATVWVGPQKQAELYHEQLLRAGLTMAPLEPEGS

SEQ ID NO: 1434 - protein, 95 aa, Thermosynechococcus elongatus
ASVVPQERQQDTRKHYPNYKVIVLNDDFNTFQHVVACLKKYIPNMTSDRAWELTNQVHYEGQAIVWVGPQVQAELYHEQLLRAGLTMAPLEPGGS

SEQ ID NO: 1435 - protein, 95 aa, Thermosynechococcus elongatus
ASVVPQERQQDTRKHYPNYKVIVLNDDFNTFQHVVACLKKYIPNMTSDRAWELTNQVHYEGQAIVWVGPREQAELYHEQLLRVGLTMAPLEPEGS

SEQ ID NO: 1436 - protein, 95 aa, Thermosynechococcus elongatus
ASVVPQERQQDTRKHYPNYKVIVLNDDFNTFQHVVACLKKYIPNMISDRAWELTNQGHYGGRAIVWVGPQEQAELYHEQLLRAGLTMAPLEPEGS

SEQ ID NO: 1437 - protein, 95 aa, Thermosynechococcus elongatus
ASVVPQERQQDTRKHYPNYKVIVLNDDFNTFQHVVACLKKYIPNMISDRAWELTNQVHYEGQAIVWVGPQVQAELYHEQLLRAGLTMAPLEPEGS

SEQ ID NO: 1438 - protein, 95 aa, Thermosynechococcus elongatus; identical to SEQ ID NO: 12

SEQ ID NO: 1439 - protein, 95 aa, Thermosynechococcus elongatus
ASVVPQERQQDTRKHYPNYKVIVLNDDFNTFQHVVACLKKYIPNMISDRAWELTNQVHYGGRAIVWVGQQEQAELYHEQLLRAGLTMAPLEPEGS

SEQ ID NO: 1440 - protein, 95 aa, Thermosynechococcus elongatus
ASVVPQERQQDTRKHYPNYKVIVLNDDFNTFQHVVACLKKYIPNMISDRAWELTNQVHYGGRAIVWVGPQEQAELYHKQLLRAGLTMAPLEPEGS

SEQ ID NO: 1441 - protein, 95 aa, Thermosynechococcus elongatus
ASVVPQERQQDTRKHYPNYKVIVLNDDFNTFQHVVACLKKYIPNMISDRAWELTNQVHYGGRAIVWVGPQEQAELYHEQLLRAGLTMATLEPEGS

SEQ ID NO: 1442 - protein, 95 aa, Thermosynechococcus elongatus; identical to SEQ ID NO: 12

SEQ ID NO: 1443 - protein, 95 aa, Thermosynechococcus elongatus
ASVVPQERQQDTRKHYPNYKVIVLNDDFNTFQHVVACLKKYIPNMISDRAWELTNQVHYGGRAIVWVGPQEQAELYHEQLLRAGLTMAPLEPDGS

SEQ ID NO: 1444 - protein, 95 aa, Thermosynechococcus elongatus; identical to SEQ ID NO: 112

SEQ ID NO: 1445 - protein, 95 aa, Thermosynechococcus elongatus
ASVVPQERQQDTRKHYPNYKVIVLNDDFNTFQHVVACLKKYIPNMISDRAWELTNQVHYGGRAIVWVGPQEQAELYHEQLLRAGFTMAPLEPEGS

SEQ ID NO: 1446 - protein, 95 aa, Thermosynechococcus elongatus
ASVVPQERQQDTRKHYPNYKVIVLNDDFNTFQHVVACLKKYIPNMISDRAWELTNQVHYGGRAIVWVGPQVQAELYHEQLLRAGLTMAPLEPEGS

SEQ ID NO: 1447 - protein, 95 aa, Thermosynechococcus elongatus
ASVVPQERQQDTRKHYPNYKVIVLNDDFNTFQHVVACLKKYIPNMISDRAWELTNQVHYGGRAIVWVCPQEQAELYHEQLLRAGLTMAPLEPEGS

SEQ ID NO: 1448 - protein, 95 aa, Thermosynechococcus elongatus
ASVVPQERQQDTRKHYPNYKVIVLNDDFNTFQHVVACLKKYIPNMISDRAWELTNQVHFGGRAIVWVGPQEQAELYHEQLLRAGLTMAPLEPEGS

SEQ ID NO: 1449 - protein, 95 aa, Thermosynechococcus elongatus
ASVVPQERQQDTRKHYPNYKVIVLNDDFNTFQHVVACLKKYIPNMISDRAWELTNHVHYGGRAIVWVGPQEQAELYHEQLLRAGLTMAPLEPEGS

SEQ ID NO: 1450 - protein, 51 aa, Thermosynechococcus elongatus
ASVVPQERQQDTRKHYPNYKVIVLNDDFNTFQHVVACLKKYIPNMISDRAW

SEQ ID NO: 1451 - protein, 95 aa, Thermosynechococcus elongatus
ASVVPQERQQDTRKHYPNYKVIVLNDDFNTFQHVVACLMKYIPNMTSDRAWELTNQVHYEGQAIVWVGPQVQAELYHEQLLRAGLTMAPLEPEGS

SEQ ID NO: 1452 - protein, 95 aa, Thermosynechococcus elongatus
ASVVPQERQQDTRKHYPNYKVIVLNDDFNTFQHVVACLMKYIPNMTSDRAWELTNQVHYEGQAIVWVGPQVQAELYHEQLLRAGLTMAPLEPVGS

SEQ ID NO: 1453 - protein, 95 aa, Thermosynechococcus elongatus
ASVVPQERQQDTRKHYPNYKVIVLNDDFNTFRNVAACLMKYIPNMTSDRAWELTNQVHYEGQAIVWVGPQEQAELYHEQLLRAGLTMAPLEPGGS

SEQ ID NO: 1454 - protein, 95 aa, Thermosynechococcus elongatus
ASVVPQERQQDTRKHYPNYKVIVLNDDFNTFRQVAACLMKYIPNKTSDRAWELTNQVHYEGQAIVWVGPQVQAELYHEQLLRAGLTMAPLEPGGS

SEQ ID NO: 1455 - protein, 95 aa, Thermosynechococcus elongatus
ASVVPQERQQDTRKHYPNYKVIVLNDDFNTFRHDAACLMKYIPNKTSDRAWELTNQVHYEGQAIVWVGPQEQAELYHEQLLRAGLTMAPLEPEGS

SEQ ID NO: 1456 - protein, 95 aa, Thermosynechococcus elongatus
ASVVPQERQQDTRKHYPNYKVIVLNDDFNTFRHDAACLMKYIPNKTSDRAWELTNQVHYEGQAIVWVGPQEQAELYHEQLLRAGLTMAPLEPGGS

SEQ ID NO: 1457 - protein, 95 aa, Thermosynechococcus elongatus; identical to SEQ ID NO: 4

SEQ ID NO: 1458 - protein, 95 aa, Thermosynechococcus elongatus
ASVVPQERQQDTRKHYPNYKVIVLNDDFNTFRHVAECLMKYIPNMTSDRAWELTNQVHYEGQAIVWVGPQEQAELYHEQLLRAGLTMAPLEPEGS

SEQ ID NO: 1459 - protein, 95 aa, Thermosynechococcus elongatus
ASVVPQERQQDTRKHYPNYKVIVLNDDFNTFRHVAECLMKYIPNMTSDRAWELTNQVHYEGQAIVWVGPQVQAELYHEQLLRAGLTMAPLEPGGS

SEQ ID NO: 1460 - protein, 95 aa, Thermosynechococcus elongatus
ASVVPQERQQDTRKHYPNYKVIVLNDDFNTFRHVAARLMKYIPNMTSDRAWELTNQVHYEGQAIVWVGPQEQAELYHEQLLRAGLTMAPLEPEGS

SEQ ID NO: 1461 - protein, 95 aa, Thermosynechococcus elongatus
ASVVPQERQQDTRKHYPNYKVIVLNDDFNTFRHVAACMMKYIPNMTSDRAWELTNQVHYEGQAIVWVGPQEQAELYHEQLLRAGLTMAPLEPEGS

SEQ ID NO: 1462 - protein, 95 aa, Thermosynechococcus elongatus; identical to SEQ ID NO: 4

SEQ ID NO: 1463 - protein, 95 aa, Thermosynechococcus elongatus; identical to SEQ ID NO: 4

SEQ ID NO: 1464 - protein, 95 aa, Thermosynechococcus elongatus
ASVVPQERQQDTRKHYPNYKVIVLNDDFNTFRHVAACLKKYIPNMTSDRAWELTNQVHYEGQAIVWVGPQEQAELYHEQLLRAGLTMAPLEPEGS

SEQ ID NO: 1465 - protein, 95 aa, Thermosynechococcus elongatus
ASVVPQERQQDTRKHYPNYKVIVLNDDFNTFRHVAACLKKYIPNMISDRAWELTNQVHYKGQAIVWVGPQEQAELNHEQLLRAGLTMAPLEPEGS

SEQ ID NO: 1466 - protein, 95 aa, Thermosynechococcus elongatus
ASVVPQERQQDTRKHYPNYKVIVLNDDFNTFRHVAACLKKYIPNMISDRAWELTNQVHYGGRAIVWVGPQEQAELYHEQWLRAGLTMAPLEPEGS

SEQ ID NO: 1467 - protein, 95 aa, Thermosynechococcus elongatus
ASVVPQERQQDTRKHYPNYKVIVLNDDFNTFRHVAACLKKYIPNMISDRAWELTNQVHYGGRAIVWVGPQVQAELYHEQLLRAGLTMAPLEPGGS

SEQ ID NO: 1468 - protein, 95 aa, Thermosynechococcus elongatus
ASVVPQERQQDTRKHYPNYKVIVLNDDFNTFRHVAACLTKYIPNMTSDRAWELTNQVHYEGQAIVWVGPQEQAELYHEQLLRAGLTMAPLEPEGS

SEQ ID NO: 1469 - protein, 95 aa, Thermosynechococcus elongatus
ASVVPQERQQDTRKHYPNYKVIVLNDDFNTFRHVAACLMKNIPNMTSDRAWELTNQVHYEGQAIVWVGPQEQAELYHEQLLRAGLTMAPLEPEGS

SEQ ID NO: 1470 - protein, 95 aa, Thermosynechococcus elongatus
ASVVPQERQQDTRKHYPNYKVIVLNDDFNTFRHVAACLMKDIPNMTSDRAWELTNQVHYEGQAIVWVGPQEQAELYHEQLLRAGLTMAPLEPEGS

SEQ ID NO: 1471 - protein, 95 aa, Thermosynechococcus elongatus
ASVVPQERQQDTRKHYPNYKVIVLNDDFNTFRHVAACLMKYTPNMTSDRAWELTNQVHYEGQAIVWVGPQEQAELYHEQLLRAGLTMAPLEPEGS

SEQ ID NO: 1472 - protein, 95 aa, Thermosynechococcus elongatus
ASVVPQERQQDTRKHYPNYKVIVLNDDFNTFRHVAACLMKYTPNMTSDRAWELTNQVHYEGQAIVWVGPQVQAELYHEQLLRAGLTMAPLEPGGS

SEQ ID NO: 1473 - protein, 95 aa, Thermosynechococcus elongatus
ASVVPQERQQDTRKHYPNYKVIVLNDDFNTFRHVAACLMKYITNKTSDRAWELTNQVHYEGQAIVWVGPQEQAELYHEQLLRAGLTMAPLEPEGS

SEQ ID NO: 1474 - protein, 95 aa, Thermosynechococcus elongatus
ASVVPQERQQDTRKHYPNYKVIVLNDDFNTFRHVAACLMKYITNMTSDRAWELTNQVHYKGQAIVWVGPQEQAELNHEQLLRAGLTMAPLEPEGS

SEQ ID NO: 1475 - protein, 95 aa, Thermosynechococcus elongatus
ASVVPQERQQDTRKHYPNYKVIVLNDDFNTFRHVAACLMKYIQNKTSDRAWELTNQVHYEGQAIVWVGPQEQAELNHEQLLRAGLTMAPLEPEGS

SEQ ID NO: 1476 - protein, 95 aa, Thermosynechococcus elongatus
ASVVPQERQQDTRKHYPNYKVIVLNDDFNTFRHVAACLMKYIQNMTSDRAWELTNQVHYEGQAIVWVGPQEQAELYHEQLLRAGLTMAPLEPEGS

SEQ ID NO: 1477 - protein, 95 aa, Thermosynechococcus elongatus
ASVVPQERQQDTRKHYPNYKVIVLNDDFNTFRHVAACLMKYIQNMTSDRAWELTNQVHYEGQAIVWVGPQVQAELYHEQLLRAGLTMAPLEPGGS

SEQ ID NO: 1478 - protein, 95 aa, Thermosynechococcus elongatus; identical to SEQ ID NO: 4

SEQ ID NO: 1479 - protein, 95 aa, Thermosynechococcus elongatus
ASVVPQERQQDTRKHYPNYKVIVLNDDFNTFRHVAACLMKYIPNKTSDRAWELTNQIHYEGQAIVWVGPQEQAELYHEQLLRAGLTMAPLEPEGS

SEQ ID NO: 1480 - protein, 95 aa, Thermosynechococcus elongatus
ASVVPQERQQDTRKHYPNYKVIVLNDDFNTFRHVAACLMKYIPNKTSDRAWELTNQAHYEGQAIVWVGPQEQAELYHEQLLRAGLTMAPLEPEGS

SEQ ID NO: 1481 - protein, 95 aa, Thermosynechococcus elongatus; identical to SEQ ID NO: 951

SEQ ID NO: 1482 - protein, 95 aa, Thermosynechococcus elongatus
ASVVPQERQQDTRKHYPNYKVIVLNDDFNTFRHVAACLMKYIPNKTSDRAWELTNQVHYEGQAIVWVVPQEQAELYHEQLLRAGLTMAPLEPEGS

SEQ ID NO: 1483 - protein, 95 aa, Thermosynechococcus elongatus
ASVVPQERQQDTRKHYPNYKVIVLNDDFNTFRHVAACLMKYIPNKTSDRAWELTNQVHYEGQAIDWVGPQEQAELYHEQLLRAGLTMAPLEPEGS

SEQ ID NO: 1484 - protein, 95 aa, Thermosynechococcus elongatus
ASVVPQERQQDTRKHYPNYKVIVLNDDFNTFRHVAACLMKYIPNKTSDRAWELTNQVHYEGQAIVRVGPQEQAELYHEQLLRAGLTMAPLEPEGS

SEQ ID NO: 1485 - protein, 95 aa, Thermosynechococcus elongatus
ASVVPQERQQDTRKHYPNYKVIVLNDDFNTFRHVAACLMKYIPNKTSDRAWELTNQVHYEGQAIVWVGQQVQAELYHEQLLRAGLTMAPLEPGGS

SEQ ID NO: 1486 - protein, 95 aa, Thermosynechococcus elongatus
ASVVPQERQQDTRKHYPNYKVIVLNDDFNTFRHVAACLMKYIPNKTSDRAWELTNQVHYEGQAIVWVGPQEQAELYHEQMLRAGLTMAPLEPEGS

SEQ ID NO: 1487 - protein, 95 aa, Thermosynechococcus elongatus
ASVVPQERQQDTRKHYPNYKVIVLNDDFNTFRHVAACLMKYIPNKTSDRAWELTNQVHYEGQAIVWVGPQEQAELYHEQFLRAGLTMAPLEPDGS

SEQ ID NO: 1488 - protein, 95 aa, Thermosynechococcus elongatus; identical to SEQ ID NO: 4

SEQ ID NO: 1489 - protein, 95 aa, Thermosynechococcus elongatus; identical to SEQ ID NO: 4

SEQ ID NO: 1490 - protein, 95 aa, Thermosynechococcus elongatus; identical to SEQ ID NO: 4

SEQ ID NO: 1491 - protein, 95 aa, Thermosynechococcus elongatus; identical to SEQ ID NO: 4

SEQ ID NO: 1492 - protein, 93 aa, Thermosynechococcus elongatus
ASVVPQERQQDTRKHYPNYKVIVLNDDFNTFRHVAACLMKYIPNKTSDRAWELTNQVHYEGQAIVWVGPQEQAELYHEQLLRAGLTMAPLEPE

SEQ ID NO: 1493 - protein, 95 aa, Thermosynechococcus elongatus
ASVVPQERQQDTRKHYPNYKVIVLNDDFNTFRHVAACLMKYIPNKTSDRAWELTNQVHYEGQAIVWVGPQEQAELYHEQLLRAGLTMAPLEPDGS

SEQ ID NO: 1494 - protein, 95 aa, Thermosynechococcus elongatus; identical to SEQ ID NO: 1493

SEQ ID NO: 1495 - protein, 95 aa, Thermosynechococcus elongatus
ASVVPQERQQDTRKHYPNYKVIVLNDDFNTFRHVAACLMKYIPNKTSDRAWELTNQVHYEGQAIVWVGPQEQAELYHEQLLRAGLTMAPLEPVGS

SEQ ID NO: 1496 - protein, 95 aa, Thermosynechococcus elongatus
ASVVPQERQQDTRKHYPNYKVIVLNDDFNTFRHVAACLMKYIPNKTSDRAWELTNQVHYEGQAIVWVGPQEQAELYHEQLLRAGLTMAPLVPEGS

SEQ ID NO: 1497 - protein, 95 aa, Thermosynechococcus elongatus
ASVVPQERQQDTRKHYPNYKVIVLNDDFNTFRHVAACLMKYIPNKTSDRAWELTNQVHYEGQAIVWVGPQEQAELYHEQLLRAGLTMASLEPEGS

SEQ ID NO: 1498 - protein, 95 aa, Thermosynechococcus elongatus
ASVVPQERQQDTRKHYPNYKVIVLNDDFNTFRHVAACLMKYIPNKTSDRAWELTNQVHYEGQAIVWVGPQEQAELYHEQLLRAGLTVAPLEPEGS

SEQ ID NO: 1499 - protein, 95 aa, Thermosynechococcus elongatus
ASVVPQERQQDTRKHYPNYKVIVLNDDFNTFRHVAACLMKYIPNKTSDRAWELTNQVHYEGQAIVWVGPQEQAELYHEQLLIAGLTMAPLEPEGS

SEQ ID NO: 1500 - protein, 95 aa, Thermosynechococcus elongatus
ASVVPQERQQDTRKHYPNYKVIVLNDDFNTFRHVAACLMKYIPNKTSDRAWELTNQVHYEGQAIVWVGPQEQAELYHEQLFRAGLTMAPLEPEGS

SEQ ID NO: 1501 - protein, 95 aa, Thermosynechococcus elongatus; identical to SEQ ID NO: 291

SEQ ID NO: 1502 - protein, 95 aa, Thermosynechococcus elongatus; identical to SEQ ID NO: 4

SEQ ID NO: 1503 - protein, 95 aa, Thermosynechococcus elongatus
ASVVPQERQQDTRKHYPNYKVIVLNDDFNTFRHVAACLMKYIPNKTSDRAWELTNQVHYEGQAIVWVGPQEQAELYPEQLLRAGLTMAPLEPEGS

SEQ ID NO: 1504 - protein, 95 aa, Thermosynechococcus elongatus
ASVVPQERQQDTRKHYPNYKVIVLNDDFNTFRHVAACLMKYIPNKTSDRAWELTNQVHYEGQAIVWVGPQAQAELYHEQLLRAGLTMAPLEPEGS

SEQ ID NO: 1505 - protein, 70 aa, Thermosynechococcus elongatus
ASVVPQERQQDTRKHYPNYKVIVLNDDFNTFRHVAACLMKYIPNKTSDRAWELTNQVHYEGQAIVWVGPQ

SEQ ID NO: 1506 - protein, 95 aa, Thermosynechococcus elongatus; identical to SEQ ID NO: 4

SEQ ID NO: 1507 - protein, 95 aa, Thermosynechococcus elongatus; identical to SEQ ID NO: 315

SEQ ID NO: 1508 - protein, 95 aa, Thermosynechococcus elongatus; identical to SEQ ID NO: 964

SEQ ID NO: 1509 - protein, 95 aa, Thermosynechococcus elongatus
ASVVPQERQQDTRKHYPNYKVIVLNDDFNTFRHVAACLMKYIPNKTSDRAWELTNQVHYGGRAIVWVGPQVQAELYHEQLLRAGLTMAPLEPGGS

SEQ ID NO: 1510 - protein, 95 aa, Thermosynechococcus elongatus
ASVVPQERQQDTRKHYPNYKVIVLNDDFNTFRHVAACLMKYIPNKTSDRAWELTNQFHYEGQAIVWVGPQEQAELYHEQLLRAGLTMAPLEPEGS

SEQ ID NO: 1511 - protein, 95 aa, Thermosynechococcus elongatus
ASVVPQERQQDTRKHYPNYKVIVLNDDFNTFRHVAACLMKYIPNKTSDRAWELTNRVHYEGQAIVWVGPQEQAELYHEQLLRAGLTMAPLEPEGS

SEQ ID NO: 1512 - protein, 95 aa, Thermosynechococcus elongatus
ASVVPQERQQDTRKHYPNYKVIVLNDDFNTFRHVAACLMKYIPNKTSDRAWELANQVHYEGQAIVWVGPQEQAELYHEQLLRAGLTMAPLEPEGS

SEQ ID NO: 1513 - protein, 95 aa, Thermosynechococcus elongatus
ASVVPQERQQDTRKHYPNYKVIVLNDDFNTFRHVAACLMKYIPNKTSDRAWDLTNQVHYEGQAIVWVGPQEQAELYHEQLLRAGLTMAPLEPEGS

SEQ ID NO: 1514 - protein, 95 aa, Thermosynechococcus elongatus
ASVVPQERQQDTRKHYPNYKVIVLNDDFNTFRHVAACLMKYIPNKTSDRACELTNQVHYEGQAIVWVGPQEQAELYHEQLLRAGLTMAPLEPEGS

SEQ ID NO: 1515 - protein, 95 aa, Thermosynechococcus elongatus; identical to SEQ ID NO: 972

SEQ ID NO: 1516 - protein, 95 aa, Thermosynechococcus elongatus
ASVVPQERQQDTRKHYPNYKVIVLNDDFNTFRHVAACLMKYIPNKTSYRAWELTNQVHYEGQAIVWVGPQEQAELYHEQLLRAGLTMAPLEPEGS

SEQ ID NO: 1517 - protein, 95 aa, Thermosynechococcus elongatus
ASVVPQERQQDTRKHYPNYKVIVLNDDFNTFRHVAACLMKYIPNKASDRAWELTNQVHYEGQAIVWVGPQEQAELYHEQLLRAGLTMAPLEPEGS

SEQ ID NO: 1518 - protein, 95 aa, Thermosynechococcus elongatus
ASVVPQERQQDTRKHYPNYKVIVLNDDFNTFRHVAACLMKYIPNTTSDRAWELTNQVHYEGQAIVWVGPQEQAELYHEQLLRAGLTMAPLEPEGS

SEQ ID NO: 1519 - protein, 95 aa, Thermosynechococcus elongatus
ASVVPQERQQDTRKHYPNYKVIVLNDDFNTFRHVAACLMKYIPNMNSDRAWELTNQVHYEGQAIVWVGPQEQAELYHEQLLRAGLTMAPLEPEGS

SEQ ID NO: 1520 - protein, 95 aa, Thermosynechococcus elongatus
ASVVPQERQQDTRKHYPNYKVIVLNDDFNTFRHVAACLMKYIPNMTSNRAWELTNQVHYEGQAIVWVGPQEQAELYHEQLLRAGLTMAPLEPEGS

SEQ ID NO: 1521 - protein, 95 aa, Thermosynechococcus elongatus
ASVVPQERQQDTRKHYPNYKVIVLNDDFNTFRHVAACLMKYIPNMTSDRDWELTNQVHYEGQAIVWVGPQEQAELYHEQLLRAGLTMAPLEPEGS

SEQ ID NO: 1522 - protein, 95 aa, Thermosynechococcus elongatus
ASVVPQERQQDTRKHYPNYKVIVLNDDFNTFRHVAACLMKYIPNMTSDRAWELTNKVHYEGQAIVWVGPQVQAELYHEQLLRAGLTMAPLEPGGS

SEQ ID NO: 1523 - protein, 95 aa, Thermosynechococcus elongatus
ASVVPQERQQDTRKHYPNYKVIVLNDDFNTFRHVAACLMKYIPNMTSDRAWELTNQVNYEGQAIVWVGPQEQAELYHEQLLRAGLTMAPLEPEGS

SEQ ID NO: 1524 - protein, 95 aa, Thermosynechococcus elongatus
ASVVPQERQQDTRKHYPNYKVIVLNDDFNTFRHVAACLMKYIPNMTSDRAWELTNQVHDEGQAIVWVGPQEQAELYHEQLLRAGLTMAPLEPEGS

SEQ ID NO: 1525 - protein, 95 aa, Thermosynechococcus elongatus
ASVVPQERQQDTRKHYPNYKVIVLNDDFNTFRHVAACLMKYIPNMTSDRAWELTNQVHYESQAIVWVGPQEQAELYHEQLLRAGLTMAPLEPEGS

SEQ ID NO: 1526 - protein, 95 aa, Thermosynechococcus elongatus
ASVVPQERQQDTRKHYPNYKVIVLNDDFNTFRHVAACLMKYIPNMTSDRAWELTNQVHYEGKAIVWVGPQEQAELYHEQLLRAGLTMAPLEPEGS

SEQ ID NO: 1527 - protein, 95 aa, Thermosynechococcus elongatus
ASVVPQERQQDTRKHYPNYKVIVLNDDFNTFRHVAACLMKYIPNMTSDRAWELTNQVHYEGKAIVWVGPQVQAELYHEQLLRAGLTMAPLEPGGS

SEQ ID NO: 1528 - protein, 95 aa, Thermosynechococcus elongatus
ASVVPQERQQDTRKHYPNYKVIVLNDDFNTFRHVAACLMKYIPNMTSDRAWELTNQVHYEGQDIVWVGPQEQAELYHEQLLRAGLTMAPLEPEGS

SEQ ID NO: 1529 - protein, 95 aa, Thermosynechococcus elongatus; identical to SEQ ID NO: 67

SEQ ID NO: 1530 - protein, 95 aa, Thermosynechococcus elongatus
ASVVPQERQQDTRKHYPNYKVIVLNDDFNTFRHVAACLMKYIPNMTSDRAWELTNQVHYEGQAIVWVGPQEQAELNHEQLLRAGLTMAPLEPGGS

SEQ ID NO: 1531 - protein, 95 aa, Thermosynechococcus elongatus; identical to SEQ ID NO: 2

SEQ ID NO: 1532 - protein, 95 aa, Thermosynechococcus elongatus
ASVVPQERQQDTRKHYPNYKVIVLNDDFNTFRHVAACLMKYIPNMTSDRAWELTNQVHYEGQAIVRVGPQEQAELYHEQLLRAGLTMAPLEPEGS

SEQ ID NO: 1533 - protein, 95 aa, Thermosynechococcus elongatus
ASVVPQERQQDTRKHYPNYKVIVLNDDFNTFRHVAACLMKYIPNMTSDRAWELTNQVHYEGQAIVWDGPQEQAELYHEQLLRAGLTMAPLEPEGS

SEQ ID NO: 1534 - protein, 95 aa, Thermosynechococcus elongatus
ASVVPQERQQDTRKHYPNYKVIVLNDDFNTFRHVAACLMKYIPNMTSDRAWELTNQVHYEGQAIVWAGPQEQAELYHEQLLRAGLTMAPLEPEGS

SEQ ID NO: 1535 - protein, 95 aa, Thermosynechococcus elongatus; identical to SEQ ID NO: 2

SEQ ID NO: 1536 - protein, 95 aa, Thermosynechococcus elongatus
ASVVPQERQQDTRKHYPNYKVIVLNDDFNTFRHVAACLMKYIPNMTSDRAWELTNQVHYEGQAIVWVGQQEQAELYHEQLLRAGLTMAPLEPEGS

SEQ ID NO: 1537 - protein, 95 aa, Thermosynechococcus elongatus
ASVVPQERQQDTRKHYPNYKVIVLNDDFNTFRHVAACLMKYIPNMTSDRAWELTNQVHYEGQAIVWVGPQEQAEIYHEQLLRAGLTMAPLEPEGS

SEQ ID NO: 1538 - protein, 95 aa, Thermosynechococcus elongatus
ASVVPQERQQDTRKHYPNYKVIVLNDDFNTFRHVAACLMKYIPNMTSDRAWELTNQVHYEGQAIVWVGPQEQAELDHEQLLRAGLTMAPLEPEGS

SEQ ID NO: 1539 - protein, 95 aa, Thermosynechococcus elongatus; identical to SEQ ID NO: 2

SEQ ID NO: 1540 - protein, 95 aa, Thermosynechococcus elongatus
ASVVPQERQQDTRKHYPNYKVIVLNDDFNTFRHVAACLMKYIPNMTSDRAWELTNQVHYEGQAIVWVGPQEQAELYHEQSLRAGLTMAPLEPEGS

SEQ ID NO: 1541 - protein, 95 aa, Thermosynechococcus elongatus; identical to SEQ ID NO: 2

SEQ ID NO: 1542 - protein, 95 aa, Thermosynechococcus elongatus
ASVVPQERQQDTRKHYPNYKVIVLNDDFNTFRHVAACLMKYIPNMTSDRAWELTNQVHYEGQAIVWVGPQEQAELYHEQLWRAGLTRAPLEPEGS

SEQ ID NO: 1543 - protein, 95 aa, Thermosynechococcus elongatus; identical to SEQ ID NO: 2

SEQ ID NO: 1544 - protein, 95 aa, Thermosynechococcus elongatus
ASVVPQERQQDTRKHYPNYKVIVLNDDFNTFRHVAACLMKYIPNMTSDRAWELTNQVHYEGQAIVWVGPQEQAELYHEQLLTAGLTMAPLEPEGS

SEQ ID NO: 1545 - protein, 95 aa, Thermosynechococcus elongatus
ASVVPQERQQDTRKHYPNYKVIVLNDDFNTFRHVAACLMKYIPNMTSDRAWELTNQVHYEGQAIVWVGPQEQAELYHEQLLRTGLTMAPLEPGGS

SEQ ID NO: 1546 - protein, 95 aa, Thermosynechococcus elongatus
ASVVPQERQQDTRKHYPNYKVIVLNDDFNTFRHVAACLMKYIPNMTSDRAWELTNQVHYEGQAIVWVGPQEQAELYHEQLLRASLTMAPLEPEGS

SEQ ID NO: 1547 - protein, 95 aa, Thermosynechococcus elongatus; identical to SEQ ID NO: 2

SEQ ID NO: 1548 - protein, 95 aa, Thermosynechococcus elongatus
ASVVPQERQQDTRKHYPNYKVIVLNDDFNTFRHVAACLMKYIPNMTSDRAWELTNQVHYEGQAIVWVGPQEQAELYHEQLLRAGLNMAPLEPEGS

SEQ ID NO: 1549 - protein, 95 aa, Thermosynechococcus elongatus
ASVVPQERQQDTRKHYPNYKVIVLNDDFNTFRHVAACLMKYIPNMTSDRAWELTNQVHYEGQAIVWVGPQEQAELYHEQLLRAGLTTAPLEPEGS

SEQ ID NO: 1550 - protein, 95 aa, Thermosynechococcus elongatus; identical to SEQ ID NO: 346

SEQ ID NO: 1551 - protein, 95 aa, Thermosynechococcus elongatus
ASVVPQERQQDTRKHYPNYKVIVLNDDFNTFRHVAACLMKYIPNMTSDRAWELTNQVHYEGQAIVWVGPQEQAELYHEQLLRAGLTMAQLVPEGS

SEQ ID NO: 1552 - protein, 95 aa, Thermosynechococcus elongatus
ASVVPQERQQDTRKHYPNYKVIVLNDDFNTFRHVAACLMKYIPNMTSDRAWELTNQVHYEGQAIVWVGPQEQAELYHEQLLRAGLTMAQFEPEGS

SEQ ID NO: 1553 - protein, 94 aa, Thermosynechococcus elongatus
ASVVPQERQQDTRKHYPNYKVIVLNDDFNTFRHVAACLMKYIPNMTSDRAWELTNQVHYEGQAIVWVGPQEQAELYHEQLLRAGLTMAPWNQKD

SEQ ID NO: 1554 - protein, 95 aa, Thermosynechococcus elongatus; identical to SEQ ID NO: 2

SEQ ID NO: 1555 - protein, 95 aa, Thermosynechococcus elongatus; identical to SEQ ID NO: 2

SEQ ID NO: 1556 - protein, 95 aa, Thermosynechococcus elongatus
ASVVPQERQQDTRKHYPNYKVIVLNDDFNTFRHVAACLMKYIPNMTSDRAWELTNQVHYEGQAIVWVGPQEQAELYHEQLLRAGLTMAPLVPEGS

SEQ ID NO: 1557 - protein, 90 aa, Thermosynechococcus elongatus; identical to SEQ ID NO: 476

SEQ ID NO: 1558 - protein, 95 aa, Thermosynechococcus elongatus; identical to SEQ ID NO: 197

SEQ ID NO: 1559 - protein, 95 aa, Thermosynechococcus elongatus
ASVVPQERQQDTRKHYPNYKVIVLNDDFNTFRHVAACLMKYIPNMTSDRAWELTNQVHYEGQAIVWVGPQEQAELYHEQFLRAGLTMAPLEPDGS

SEQ ID NO: 1560 - protein, 95 aa, Thermosynechococcus elongatus
ASVVPQERQQDTRKHYPNYKVIVLNDDFNTFRHVAACLMKYIPNMTSDRAWELTNQVHYEGQAIVWVGPQEQAELYHDQLLRAGLTMAPLEPEGS

SEQ ID NO: 1561 - protein, 95 aa, Thermosynechococcus elongatus
ASVVPQERQQDTRKHYPNYKVIVLNDDFNTFRHVAACLMKYIPNMTSDRAWELTNQVHYEGQAIVWVGPQEQAELYQEQWLRAGLTMAPLEPEGS

SEQ ID NO: 1562 - protein, 95 aa, Thermosynechococcus elongatus
ASVVPQERQQDTRKHYPNYKVIVLNDDFNTFRHVAACLMKYIPNMTSDRAWELTNQVHYEGQAIVWVGPQEQAELYREQLLRAGLTMAPLEPEGS

SEQ ID NO: 1563 - protein, 95 aa, Thermosynechococcus elongatus
ASVVPQERQQDTRKHYPNYKVIVLNDDFNTFRHVAACLMKYIPNMTSDRAWELTNQVHYEGQAIVWVGPQEQAELSHEQLLRAGLTMAPLEPEGS

SEQ ID NO: 1564 - protein, 95 aa, Thermosynechococcus elongatus
ASVVPQERQQDTRKHYPNYKVIVLNDDFNTFRHVAACLMKYIPNMTSDRAWELTNQVHYEGQAIVWVGPQEQAELFHEQLLRAGLTMAPLEPEGS

SEQ ID NO: 1565 - protein, 95 aa, Thermosynechococcus elongatus
ASVVPQERQQDTRKHYPNYKVIVLNDDFNTFRHVAACLMKYIPNMTSDRAWELTNQVHYEGQAIVWVGPQDQAELYHEQLLRAGLTMAPLEPEGS

SEQ ID NO: 1566 - protein, 95 aa, Thermosynechococcus elongatus
ASVVPQERQQDTRKHYPNYKVIVLNDDFNTFRHVAACLMKYIPNMTSDRAWELTNQVHYEGQAIVWVGPQDQAELYHEQLLRAGLTMAPLEPDGS

SEQ ID NO: 1567 - protein, 95 aa, Thermosynechococcus elongatus
ASVVPQERQQDTRKHYPNYKVIVLNDDFNTFRHVAACLMKYIPNMTSDRAWELTNQVHYEGQAIVWVGPQAQAELYHEQLLRAGLTMAPLEPEGS

SEQ ID NO: 1568 - protein, 95 aa, Thermosynechococcus elongatus
ASVVPQERQQDTRKHYPNYKVIVLNDDFNTFRHVAACLMKYIPNMTSDRAWELTNQVHYEGQAIVWVGPQGQAELYHEQLLRAGLTMAPLEPEGS

SEQ ID NO: 1569 - protein, 95 aa, Thermosynechococcus elongatus
ASVVPQERQQDTRKHYPNYKVIVLNDDFNTFRHVAACLMKYIPNMTSDRAWELTNQVHYEGQAIVWVGPQVQAELYHKQLLRAGLTMAPLEPEGS

SEQ ID NO: 1570 - protein, 95 aa, Thermosynechococcus elongatus
ASVVPQERQQDTRKHYPNYKVIVLNDDFNTFRHVAACLMKYIPNMTSDRAWELTNQVHYEGQAIVWVGPQVQAELYHEQLLRAGLTIAPLEPGGS

SEQ ID NO: 1571 - protein, 95 aa, Thermosynechococcus elongatus
ASVVPQERQQDTRKHYPNYKVIVLNDDFNTFRHVAACLMKYIPNMTSDRAWELTNQVHYEGQAIVWVGPQVQAELYHEQLLRVGLTMAPLEPEGS

SEQ ID NO: 1572 - protein, 95 aa, Thermosynechococcus elongatus
ASVVPQERQQDTRKHYPNYKVIVLNDDFNTFRHVAACLMKYIPNMTSDRAWELTNQVHYEGQAIVWVGPQVQAELYHELLLRAGLTMAPLEPGGS

SEQ ID NO: 1573 - protein, 95 aa, Thermosynechococcus elongatus; identical to SEQ ID NO: 2

SEQ ID NO: 1574 - protein, 95 aa, Thermosynechococcus elongatus; identical to SEQ ID NO: 1002

SEQ ID NO: 1575 - protein, 95 aa, Thermosynechococcus elongatus
ASVVPQERQQDTRKHYPNYKVIVLNDDFNTFRHVAACLMKYIPNMTSDRAWELTNQVHYEGQAIVWVCPQVQAELYHEQLLRAGLTMAPLEPEGS

SEQ ID NO: 1576 - protein, 95 aa, Thermosynechococcus elongatus
ASVVPQERQQDTRKHYPNYKVIVLNDDFNTFRHVAACLMKYIPNMTSDRAWELTNQVHYEGQAIVCVGPQVQAELYHEQLLRAGLTMAPLEPGGS

SEQ ID NO: 1577 - protein, 95 aa, Thermosynechococcus elongatus
ASVVPQERQQDTRKHYPNYKVIVLNDDFNTFRHVAACLMKYIPNMTSDRAWELTNQVHYEGQAIVLVGPQVQAELYHEQLLRAGLTMAPLEPGGS

SEQ ID NO: 1578 - protein, 95 aa, Thermosynechococcus elongatus
ASVVPQERQQDTRKHYPNYKVIVLNDDFNTFRHVAACLMKYIPNMTSDRAWELTNQVHYEGQAIFWVGPQEQAELYHEQLLRAGLTMAPLEPEGS

SEQ ID NO: 1579 - protein, 95 aa, Thermosynechococcus elongatus; identical to SEQ ID NO: 2

SEQ ID NO: 1580 - protein, 95 aa, Thermosynechococcus elongatus
ASVVPQERQQDTRKHYPNYKVIVLNDDFNTFRHVAACLMKYIPNMTSDRAWELTNQVHYECQAIVWVGPQVQAELYHEQLLRAGLTMAPLEPEGS

SEQ ID NO: 1581 - protein, 95 aa, Thermosynechococcus elongatus
ASVVPQERQQDTRKHYPNYKVIVLNDDFNTFRHVAACLMKYIPNMTSDRAWELTNQVHYECLAIVWVGPQEQAELYHEQLLRAGLTMAPLEPEGS

SEQ ID NO: 1582 - protein, 95 aa, Thermosynechococcus elongatus
ASVVPQERQQDTRKHYPNYKVIVLNDDFNTFRHVAACLMKYIPNMTSDRAWELTNQVHYGGRAIVWVGPQEQAELNHEQLLRAGLTMAPLEPEGS

SEQ ID NO: 1583 - protein, 95 aa, Thermosynechococcus elongatus; identical to SEQ ID NO: 408

SEQ ID NO: 1584 - protein, 95 aa, Thermosynechococcus elongatus; identical to SEQ ID NO: 481

SEQ ID NO: 1585 - protein, 59 aa, Thermosynechococcus elongatus; identical to SEQ ID NO: 736

SEQ ID NO: 1586 - protein, 95 aa, Thermosynechococcus elongatus; identical to SEQ ID NO: 578

SEQ ID NO: 1587 - protein, 95 aa, Thermosynechococcus elongatus
ASVVPQERQQDTRKHYPNYKVIVLNDDFNTFRHVAACLMKYIPNMTSDRAWELTNQVRYEGQAIVWVGPQEQAELYHEQLLRAGLTMAPLEPEGS

SEQ ID NO: 1588 - protein, 95 aa, Thermosynechococcus elongatus
ASVVPQERQQDTRKHYPNYKVIVLNDDFNTFRHVAACLMKYIPNMTSDRAWELTNQVDYEGQAIVWVGPQGQAELYHEQLLRAGLTMAPLEPEGS

SEQ ID NO: 1589 - protein, 95 aa, Thermosynechococcus elongatus
ASVVPQERQQDTRKHYPNYKVIVLNDDFNTFRHVAACLMKYIPNMTSDRAWELTNQVYYEGQAIVWVGPQVQAELYHEQLLRAGLTMAPLEPGGS

SEQ ID NO: 1590 - protein, 95 aa, Thermosynechococcus elongatus
ASVVPQERQQDTRKHYPNYKVIVLNDDFNTFRHVAACLMKYIPNMTSDRAWELTNRVHYEGQAIVWVGPQEQAELYHEQLLRAGLTMAPLEPEGS

SEQ ID NO: 1591 - protein, 55 aa, Thermosynechococcus elongatus
ASVVPQERQQDTRKHYPNYKVIVLNDDFNTFRHVAACLMKYIPNMTSDRAWELTN

SEQ ID NO: 1592 - protein, 95 aa, Thermosynechococcus elongatus
ASVVPQERQQDTRKHYPNYKVIVLNDDFNTFRHVAACLMKYIPNMTSDRAWELANQVHYEGQAIVWVGPQEQAELYHEQLLRAGLTMAPLEPEGS

SEQ ID NO: 1593 - protein, 95 aa, Thermosynechococcus elongatus
ASVVPQERQQDTRKHYPNYKVIVLNDDFNTFRHVAACLMKYIPNMTSDRAWDLTNQVHYEGQAIVWVGPQVQAELYHEQLLRAGLTMAPLEPGGS

SEQ ID NO: 1594 - protein, 95 aa, Thermosynechococcus elongatus
ASVVPQERQQDTRKHYPNYKVIVLNDDFNTFRHVAACLMKYIPNMTSDRACELTNQVHYKGQAIVWVGPQEQAELNHEQLLRAGLTMAPLEPEGS

SEQ ID NO: 1595 - protein, 95 aa, Thermosynechococcus elongatus; identical to SEQ ID NO: 579

SEQ ID NO: 1596 - protein, 95 aa, Thermosynechococcus elongatus
ASVVPQERQQDTRKHYPNYKVIVLNDDFNTFRHVAACLMKYIPNMTCDRAWELTNQVHYEGQAIVWVGPQEQAELYHEQLLRAGLTMAPLEPEGS

SEQ ID NO: 1597 - protein, 95 aa, Thermosynechococcus elongatus
ASVVPQERQQDTRKHYPNYKVIVLNDDFNTFRHVAACLMKYIPNMISDRAWELTNQVHYEGQAIVWVGPQVQAELYHEQLLRAGLTMAPLEPGGS

SEQ ID NO: 1598 - protein, 95 aa, Thermosynechococcus elongatus
ASVVPQERQQDTRKHYPNYKVIVLNDDFNTFRHVAACLMKYIPNMISDRAWELTNQVHYGGQAIVWVGPQEQAELYHEQLLRAGLTMAPLEPEGS

SEQ ID NO: 1599 - protein, 95 aa, Thermosynechococcus elongatus; identical to SEQ ID NO: 740

SEQ ID NO: 1600 - protein, 95 aa, Thermosynechococcus elongatus
ASVVPQERQQDTRKHYPNYKVIVLNDDFNTFRHVAACLMKYIPNMISDRAWELTNQVHSGGRAIVWVGPQEQAELYHEQLLRAGLTMAPLEPEGS

SEQ ID NO: 1601 - protein, 95 aa, Thermosynechococcus elongatus
ASVVPQERQQDTRKHYPNYKVIVLNDDFNTFRHVAACLMKYIPNLTSDRAWELTNQVHYEGQAIVWVGPQVQAELYHEQLLRAGLTMAPLEPGGS

SEQ ID NO: 1602 - protein, 95 aa, Thermosynechococcus elongatus
ASVVPQERQQDTRKHYPNYKVIVLNDDFNTFRHVAACLMKYIPNMTSDRAWELTNQVHYKGQAIVWVGPQEQAELNHEQLLRACLTMAPLEPEGS

SEQ ID NO: 1603 - protein, 95 aa, Thermosynechococcus elongatus
ASVVPQERQQDTRKHYPNYKVIVLNDDFNTFRHVAACLMKYIPNMTSDRAWELTNQVHYKGQAIVWVGPQEQAELYHEQLLRAGLTMAPLEPGGS

SEQ ID NO: 1604 - protein, 73 aa, Thermosynechococcus elongatus
ASVVPQERQQDTRKHYPNYKVIVLNDDFNTFRHVAACLMKYIPNMTSDRAWELTNQVHYKGQAIVWVGPQEQA

SEQ ID NO: 1605 - protein, 95 aa, Thermosynechococcus elongatus
ASVVPQERQQDTRKHYPNYKVIVLNDDFNTFRHVAACLMKYIPNMTSDRAWELTNQVHYKGQAIVWVGPQVQAELYHEQLLRAGLTMAPLEPGGS

SEQ ID NO: 1606 - protein, 95 aa, Thermosynechococcus elongatus
ASVVPQERQQDTRKHYPNYKVIVLNDDFNTFRHVAACLMKYIPNMTSDRAWELTNQVHYKGRAIVWVGPQEQAELYHEQLLRAGLTMAPLEPEGS

SEQ ID NO: 1607 - protein, 95 aa, Thermosynechococcus elongatus
ASVVPQERQQDTRKHYPNYKVIVLNDDFNTFRHVAACLMKYIPNMTSDRAWELTNQVHYTGQAIVWVGPQEQAELNHEQLLRAGLTMAPLEPEGS

SEQ ID NO: 1608 - protein, 95 aa, Thermosynechococcus elongatus; identical to SEQ ID NO: 40

SEQ ID NO: 1609 - protein, 95 aa, Thermosynechococcus elongatus
ASVVPQERQQDTRKHYPNYKVIVLNDDFNTFRHVAACLMKYIPNMTSDRAWELTNQVHCKGQAIVWVGPQEQAELNHEQLLRAGLTMAPLEPEGS

SEQ ID NO: 1610 - protein, 95 aa, Thermosynechococcus elongatus
ASVVPQERQQDTRKHYPNYKVIVLNDDFNTFRHVAACLMKYIPNMTSDRSWELTNQVHYKGQAIVWVGPQEQAELNHEQLLRAGLTMAPLEPEGS

SEQ ID NO: 1611 - protein, 95 aa, Thermosynechococcus elongatus
ASVVPQERQQDTRKHYPNYKVIVLNDDFNTFRHVAACLMKYIPHMTSDRAWELTNQVHYEGQAIVWVGPQEQAELYHEQLLRAGLTMAPLEPEGS

SEQ ID NO: 1612 - protein, 95 aa, Thermosynechococcus elongatus
ASVVPQERQQDTRKHYPNYKVIVLNDDFNTFRHVAACLMKYIPDMTSDRAWELTNQVHYEGQAIVWVGPQEQAELYHEQLLRAGLTMAPLEPEGS

SEQ ID NO: 1613 - protein, 95 aa, Thermosynechococcus elongatus; identical to SEQ ID NO: 2

SEQ ID NO: 1614 - protein, 95 aa, Thermosynechococcus elongatus; identical to SEQ ID NO: 18

SEQ ID NO: 1615 - protein, 95 aa, Thermosynechococcus elongatus
ASVVPQERQQDTRKHYPNYKVIVLNDDFNTFRHVAACLIKYIPNKTSDRAWELTNQVHYEGQAIVWVGPQEQAELYHEQLLRAGLTMAPLEPEGS

SEQ ID NO: 1616 - protein, 95 aa, Thermosynechococcus elongatus
ASVVPQERQQDTRKHYPNYKVIVLNDDFNTFRHVAAWLMKYIPNKTSDRAWELTNQVHYEGQAIVWVGPQEQAELYHEQLLRAGLTMAPLEPEGS

SEQ ID NO: 1617 - protein, 95 aa, Thermosynechococcus elongatus; identical to SEQ ID NO: 2

SEQ ID NO: 1618 - protein, 95 aa, Thermosynechococcus elongatus
ASVVPQERQQDTRKHYPNYKVIVLNDDFNTFRHVVACLKKYIPNMTSDRAWELTNQVHYEGQAIVWVGPQEQAELYHEQLLRAGLTMAPLEPEGS

SEQ ID NO: 1619 - protein, 95 aa, Thermosynechococcus elongatus
ASVVPQERQQDTRKHYPNYKVIVLNDDFNTFRHVSACLMKYIPNKTSDRAWELTNQVHYEGQAIVWVGPQEQAELYHEQLLRAGLTMAPLEPEGS

SEQ ID NO: 1620 - protein, 95 aa, Thermosynechococcus elongatus
ASVVPQERQQDTRKHYPNYKVIVLNDDFNTFRHFAACLMKYIPNMTSDRAWELTNQVHYEGQAIVWVGPQVQAELYHEQLLRAGLTMAPLEPGGS

SEQ ID NO: 1621 - protein, 95 aa, Thermosynechococcus elongatus; identical to SEQ ID NO: 16

SEQ ID NO: 1622 - protein, 95 aa, Thermosynechococcus elongatus; identical to SEQ ID NO: 2

SEQ ID NO: 1623 - protein, 95 aa, Thermosynechococcus elongatus
ASVVPQERQQDTRKHYPNYKVIVLNDDFNIFRHVAACLMKYIPNKTSDRAWELTNQVHYGGRAIVWVGPQEQAELYHEQLLRAGLTMAPLEPEGS

SEQ ID NO: 1624 - protein, 95 aa, Thermosynechococcus elongatus
ASVVPQERQQDTRKHYPNYKVIVLNDDFSTFRHVAACLMKYIPNMTSDRAWELTNQVHYEGQAIVWVGPQEQAELYHEQLLRAGLTMAPLEPEGS

SEQ ID NO: 1625 - protein, 95 aa, Thermosynechococcus elongatus
ASVVPQERQQDTRKHYPNYKVIVLNDDFITFRHVAACLMKYIPNMTSDRAWELTNQVHYEGQAIVWVGPQEQAELYHEQLLRAGLTMAPLEPEGS

SEQ ID NO: 1626 - protein, 95 aa, Thermosynechococcus elongatus
ASVVPQERQQDTRKHYPNYKVIVLNDDFITFRHVAACLMKYIPNMTSDRAWELTNQVHYEGQAIVWVGPQEQAELYHEQLLRAGLTMAPLEPGGS

SEQ ID NO: 1627 - protein, 95 aa, Thermosynechococcus elongatus
ASVVPQERQQDTRKHYPNYKVIVLNDDFDTFRHVAACLMKYIPNKTSDRAWELTNQVHYEGQAIVWVGPQEQAELYHEQLLRAGLTMAPLEPEGS

SEQ ID NO: 1628 - protein, 95 aa, Thermosynechococcus elongatus; identical to SEQ ID NO: 2

SEQ ID NO: 1629 - protein, 95 aa, Thermosynechococcus elongatus
ASVVPQERQQDTRKHYPNYKVIVLNDYFNTFQHVVACLKKYIPNMISDRAWELTNQVHYGGRAIVWVGPQEQAELYHEQLLRAGLTMAPLEPEGS

SEQ ID NO: 1630 - protein, 95 aa, Thermosynechococcus elongatus
ASVVPQERQQDTRKHYPNYKVIVLNDYFNTFRHVAACLMKYIPNKTSDRAWELTNQVHYGGRAIVWVGPQEQAELYHEQLLRAGLTMAPLEPEGS

SEQ ID NO: 1631 - protein, 95 aa, Thermosynechococcus elongatus
ASVVPQERQQDTRKHYPNYKVIVLNDYFNTFRHVAACLMKYIPNMTSDRAWELTNQVHYEGQAIVWVGPQVQAELYHEQLLRAGLTMAPLEPGGS

SEQ ID NO: 1632 - protein, 95 aa, Thermosynechococcus elongatus
ASVVPQERQQDTRKHYPNYKVIVLNVDFNTFRHVAACLMKYIPNMTSDRAWELTNQVHYEGQAIVWVGPQEQAELYHEQLLRAGLTMAPLEPEGS

SEQ ID NO: 1633 - protein, 95 aa, Thermosynechococcus elongatus
ASVVPQERQQDTRKHYPNYKVIVLSDDFNTFRHVAACLMKYIPNKTSDRAWELTNQVHYEGQAIVWVGPQEQAELYHEQLLRAGLTMAPLEPEGS

SEQ ID NO: 1634 - protein, 95 aa, Thermosynechococcus elongatus
ASVVPQERQQDTRKHYPNYKVIVFNDDFNTFRHVAACLMKYIPNMTSDRAWELTNQVHYEGQAIVWVGPQVQAELYHEQLLRAGLTMAPLEPGGS

SEQ ID NO: 1635 - protein, 95 aa, Thermosynechococcus elongatus
ASVVPQERQQDTRKHYPNYKVIFLNDDFNTFRHVAACLMKYIPNKTSDRAWELTNQVHYEGQAIVWVGPQEQAELYHEQLLRAGLTMAPLEPEGS

SEQ ID NO: 1636 - protein, 95 aa, Thermosynechococcus elongatus
ASVVPQERQQDTRKHYPNYKFIVLNDDFNTFRHVAACLMKYIPNKTSDRAWELTNQVHYEGQAIVWVGPQEQAELYHEQLLRAGLTMAPLEPEGS

SEQ ID NO: 1637 - protein, 95 aa, Thermosynechococcus elongatus; identical to SEQ ID NO: 295

SEQ ID NO: 1638 - protein, 95 aa, Thermosynechococcus elongatus
ASVVPQERQQDTRKHYPNYTVRVLNDDFNTFRHVAACLMKYIPNMTSDRAWELTNQVHYEGQAIVWVGPQEQAELYHEQLLRAGLTMAPLEPEGS

SEQ ID NO: 1639 - protein, 95 aa, Thermosynechococcus elongatus
ASVVPQERQQDTRKHYPNYMVIVLNDDFNTFRHVAACLMKYIPNMTSDRAWELTNQVHYEGQAIVWVGPQEQAELYHEQLLRAGLTMAPLEPEGS

SEQ ID NO: 1640 - protein, 95 aa, Thermosynechococcus elongatus
ASVVPQERQQDTRKHYPSYKVIVLNDDFNTFRHVAACLMKYIPNMTYDRAWGLTNQVHYEGQAIVWVGPQGQAELYHEQLLRAGLTMAPLEPEGS

SEQ ID NO: 1641 - protein, 95 aa, Thermosynechococcus elongatus
ASVVPQERQQDTRKHYPSYKVIVLNDDFNTFRHVAACLMKYIPNMTSDRAWELTNQVHYEGQAIVWVGPQEQAELYHEQLLRAGLTMAPLEPEGS

SEQ ID NO: 1642 - protein, 95 aa, Thermosynechococcus elongatus
ASVVPQERQQDTRKHYSNYKVIVLNDDFNTFRHVAACLMKYIPNMTSDRAWELTNQVHYEGQAIVWVGPQVQAELYHEQLLRAGLTMAPLEPGGS

SEQ ID NO: 1643 - protein, 95 aa, Thermosynechococcus elongatus
ASVVPQERQQDTRKYYPNYKVIVLNDDFNTFRHVAACLMKYIPNKTSDRAWELTNQVHYEGQAIVWVGPQEQAELYHEQLLRAGLTMAPLEPGGS

SEQ ID NO: 1644 - protein, 95 aa, Thermosynechococcus elongatus
ASVVPQERQQDTRKYYPNYKVIVLNDDFNTFRHVAACLMKYIPNMTSDRAWELTNQVHYEGQAIVWVGPQEQAELYHEQLLRAGLTMAPLEPEGS

SEQ ID NO: 1645 - protein, 95 aa, Thermosynechococcus elongatus
ASVVPQERQQDTRNHYPNYKVIVLNDDFNTFRHVAACLMKYIPNMTSDRAWELTNQVHYEGQAIVWVGPQEQAELYHEQLLRAGLTMAPLEPEGS

SEQ ID NO: 1646 - protein, 95 aa, Thermosynechococcus elongatus; identical to SEQ ID NO: 1645

SEQ ID NO: 1647 - protein, 95 aa, Thermosynechococcus elongatus
ASVVPQERQQDTRRHYPNYKVIVLNDDFNTFRHVAACLMKYIPNMTSDRAWELTNQVHYEGQAIVWVGPQEQAELYHEQLLRAGLTMAPLEPEGS

SEQ ID NO: 1648 - protein, 95 aa, Thermosynechococcus elongatus
ASVVPQERQQDTRQHYPNYKVIVLNDDFNTFRHVAACLMKYIPNMTSDRAWELTNQVHYEGQAIVWVGPQEQAELYHEQLLRAGLTMAPLEPEGS

SEQ ID NO: 1649 - protein, 95 aa, Thermosynechococcus elongatus; identical to SEQ ID NO: 4

SEQ ID NO: 1650 - protein, 95 aa, Thermosynechococcus elongatus
ASVVPQERQQDTSKHYPNYKVIVLNDDFNTFRHVAACLMKYIPNKTSDRAWELTNQVHYEGQAIVWVGPQEQAELYHEQLLRAGLTMAPLEPEGS

SEQ ID NO: 1651 - protein, 95 aa, Thermosynechococcus elongatus
ASVVPQERQQDTIKHYPNYKVIVLNDDFNTFRHVAACLMKYIPNKTSDRAWELTNQVHYEGQAIVWVGPQEQAELYHEQLLRAGLTMAPLEPEGS

SEQ ID NO: 1652 - protein, 95 aa, Thermosynechococcus elongatus
ASVVPQERQQDTIKHYPNYKVIVLNDDFNTFRHVAACLMKYIPNMTSDRAWELTNQVHYEGQAIVWVGPQEQAELYHEQLLRAGLTMAPLEPEGS

SEQ ID NO: 1653 - protein, 95 aa, Thermosynechococcus elongatus; identical to SEQ ID NO: 4

SEQ ID NO: 1654 - protein, 95 aa, Thermosynechococcus elongatus; identical to SEQ ID NO: 18

SEQ ID NO: 1655 - protein, 95 aa, Thermosynechococcus elongatus
ASVVPQERQQVTRKHYPNYKGIVLNDDFNTFRHVAACLMKYIPNKTSDRAWELTNQVHYVGQAIVWVGPQERAELYHEQLLRAGLTMAPLEPEGS

SEQ ID NO: 1656 - protein, 95 aa, Thermosynechococcus elongatus
ASVVPQERQQVTRKHYPNYKVIVLNDDFNTFRHVAACLMKYIPNKTSDRAWELTNQVHYKGQAIVWVGPQEQAELNHEQLLRAGLTMAPLEPEGS

SEQ ID NO: 1657 - protein, 95 aa, Thermosynechococcus elongatus; identical to SEQ ID NO: 237

SEQ ID NO: 1658 - protein, 95 aa, Thermosynechococcus elongatus; identical to SEQ ID NO: 587

SEQ ID NO: 1659 - protein, 95 aa, Thermosynechococcus elongatus
ASVVPQERQQVTRKHYPNYKVIVLNDDFNTFRHVAACLMKYIPNKTSDRAWELTNQVHYVGQAIVWVGPQERAELYHEQSLRAGLTMAPLEPEGS

SEQ ID NO: 1660 - protein, 95 aa, Thermosynechococcus elongatus
ASVVPQERQQVTRKHYPNYKVIVLNDDFNTFRHVAACLMKYIPNKTSDRAWELTNQVHYVGQAIVWVGPQERAELYHEQLLRAGLTMAPLEPVGS

SEQ ID NO: 1661 - protein, 51 aa, Thermosynechococcus elongatus
ASVVPQERQQVTRKHYPNYKVIVLNDDFNTFRHVAACLMKYIPNKTSDRAW

SEQ ID NO: 1662 - protein, 95 aa, Thermosynechococcus elongatus; identical to SEQ ID NO: 47

SEQ ID NO: 1663 - protein, 95 aa, Thermosynechococcus elongatus
ASVVPQERQQVTRKHYPNYKVIVLNDDFITFRHVAACLMKYIPNKTSDRAWELTNQVHYVGQAIVWVGPQERAELYHEQLLRAGLTMAPLEPEGS

SEQ ID NO: 1664 - protein, 95 aa, Thermosynechococcus elongatus; identical to SEQ ID NO: 10

SEQ ID NO: 1665 - protein, 95 aa, Thermosynechococcus elongatus
ASVVPQERQQVTRKHHPNYKVIGLNDDFNTFRHVAACLMKYIPNMTSDRAWELTNQVHYEGQAIVWVGPQEQAELYHEQLLRAGLTMAPLEPEGS

SEQ ID NO: 1666 - protein, 95 aa, Thermosynechococcus elongatus
ASVVPQERQQVTRKHHPNYKVIVLNDDFNTFQHVAACLMKYIPNMTSDRAWELTNQVHYEGQAIVRVGPQEQAELYHKQLLRAGLTMAPLEPEGS

SEQ ID NO: 1667 - protein, 95 aa, Thermosynechococcus elongatus
ASVVPQERQQVTRKHHPNYKVIVLNDDFNTFRQVAACLMKYIPNMTSDRAWELTNQVHYEGQAIVWVGPQEQAELYHEQLLRAGLTMAPLEPEGS

SEQ ID NO: 1668 - protein, 95 aa, Thermosynechococcus elongatus
ASVVPQERQQVTRKHHPNYKVIVLNDDFNTFRHVTACLMKYIPNMTSDRAWELTNQVHYEGQAIVWVGPQEQAELYHEQLLRAGLTMAPLEPEGS

SEQ ID NO: 1669 - protein, 95 aa, Thermosynechococcus elongatus
ASVVPQERQQVTRKHHPNYKVIVLNDDFNTFRHVAACLMKYITNMTSDRAWELTNQVHYEGQAIVWVGPQEQAELYHEQLLRAGLTMAPLEPEGS

SEQ ID NO: 1670 - protein, 95 aa, Thermosynechococcus elongatus
ASVVPQERQQVTRKHHPNYKVIVLNDDFNTFRHVAACLMKYIQNMTSDRAWELTNQVHYEGQAIVWVGPQEQAELYHEQLLRAGLTMAPLEPEGS

SEQ ID NO: 1671 - protein, 95 aa, Thermosynechococcus elongatus
ASVVPQERQQVTRKHHPNYKVIVLNDDFNTFRHVAACLMKYIPNKTSDRAWELTNQVHYEGQAIVWVGPQEQAELYHEQLLRAGLTMAPLEPGGS

SEQ ID NO: 1672 - protein, 95 aa, Thermosynechococcus elongatus
ASVVPQERQQVTRKHHPNYKVIVLNDDFNTFRHVAACLMKYIPNMTSDRAWELTNQVHYEGQAIVWVGPQEQAELYHEQSLRAGLTMAPLEPEGS

SEQ ID NO: 1673 - protein, 95 aa, Thermosynechococcus elongatus
ASVVPQERQQVTRKHHPNYKVIVLNDDFNTFRHVAACLMKYIPNMTSDRAWELTNQVHYEGQAIVWVGPQEQAELYHEQLSRAGLTMAPLEPEGS

SEQ ID NO: 1674 - protein, 95 aa, Thermosynechococcus elongatus
ASVVPQERQQVTRKHHPNYKVIVLNDDFNTFRHVAACLMKYIPNMTSDRAWELTNQVHYEGQAIVWVGPQEQAELYHEQLLRAGLTIAPLEPEGS

SEQ ID NO: 1675 - protein, 95 aa, Thermosynechococcus elongatus; identical to SEQ ID NO: 10

SEQ ID NO: 1676 - protein, 95 aa, Thermosynechococcus elongatus
ASVVPQERQQVTRKHHPNYKVIVLNDDFNTFRHVAACLMKYIPNMTSDRAWELTNQVHYEGQAIVWVGPQEQAELYHEQLLRAVLTMAPLEPEGS

SEQ ID NO: 1677 - protein, 95 aa, Thermosynechococcus elongatus
ASVVPQERQQVTRKHHPNYKVIVLNDDFNTFRHVAACLMKYIPNMTSDRAWELTNQVHYVGQAIVWVGPQEQAELYHEQLLRAGLTMAPLEPKGS

SEQ ID NO: 1678 - protein, 95 aa, Thermosynechococcus elongatus
ASVVPQERQQVTRKHHPNYKVIVLNDDFNTFRHVAACLMKYIPNMTSDRACELTNQVHYEGQAIVWVGPQEQAELYHEQLLRAGLTMAPLEPEGS

SEQ ID NO: 1679 - protein, 95 aa, Thermosynechococcus elongatus
ASVVPQERQQVTRKHHPNYKVIVLNDDFNTFRHVAACLMKYIPNMTSDRALELTNQVHYEGQAIVWVGPQEQAELYHEQLLRAGLTMAPLEPEGS

SEQ ID NO: 1680 - protein, 95 aa, Thermosynechococcus elongatus
ASVVPQERQQVTRKHHPNYKVIVLNDDFNTFRHVAACLMKYIPNMTSDIAWELTNQVHYEGQAIVWVGPQEQAELYHEQLLRAGLTMAPLEPEGS

SEQ ID NO: 1681 - protein, 48 aa, Thermosynechococcus elongatus
ASVVPQERQQVTRKHHPNYKVIVLNDDFNTFRHVAACLMKYIPNMTSD

SEQ ID NO: 1682 - protein, 95 aa, Thermosynechococcus elongatus
ASVVPQERQQVTRKHHPNYKVIVLNDDFNTFRHVAACLMKYIPNITSDRAWELTNQVHYEGQAIVWVGPQEQAELYHEQLLRAGLTMAPLEPEGS

SEQ ID NO: 1683 - protein, 95 aa, Thermosynechococcus elongatus; identical to SEQ ID NO: 10

SEQ ID NO: 1684 - protein, 95 aa, Thermosynechococcus elongatus; identical to SEQ ID NO: 296

SEQ ID NO: 1685 - protein, 95 aa, Thermosynechococcus elongatus
ASVVPQERQQVTRKHHPNYKVIVLNDDFNTFRHVVACLKKYIPNMISDRAWELTNQVHYGGRAIVWVGPQEQAELYHEQLLRAGLTMAPLEPGGS

SEQ ID NO: 1686 - protein, 95 aa, Thermosynechococcus elongatus
ASVVPQERQQVTRKHHPNYKVIFLNDDFNTFRHVAACLMKYIPNMTSDRAWELTNQVHYEGQAIVWVGPQEQAELYHEQLLRAGLTMAPLEPEGS

SEQ ID NO: 1687 - protein, 95 aa, Thermosynechococcus elongatus; identical to SEQ ID NO: 10

SEQ ID NO: 1688 - protein, 95 aa, Thermosynechococcus elongatus
ASVVPQERQQVTRKHYPNYKVIILNDDFNTFQHVVACLKKYIPNMTSDRAWELTNQVHYEGQAIVWVGPQEQAELYHEQLLRAGLTMAPLEPEGS

SEQ ID NO: 1689 - protein, 95 aa, Thermosynechococcus elongatus; identical to SEQ ID NO: 13

SEQ ID NO: 1690 - protein, 95 aa, Thermosynechococcus elongatus
ASVVPQERQQVTRKHYPNYKVIVLKDDFNTFRHVAACLMKYIPNMTSDRAWELTNQVHYKGQAIVWVGPQEQAELNHEQLLRAGLTMAPLEPEGS

SEQ ID NO: 1691 - protein, 95 aa, Thermosynechococcus elongatus
ASVVPQERQQVTRKHYPNYKVIVLNDNFNTFRHVAACLMKYIPNMTSDRAWELTNQAHYKGQAIVWVGPQEQAELNHEQLLRAGLTMAPLEPEGS

SEQ ID NO: 1692 - protein, 95 aa, Thermosynechococcus elongatus
ASVVPQERQQVTRKHYPNYKVIVLNDHFNTFRHVAACLMKYIPNMTSDRAWELTNQVHYEGQAIVWVGPQEQAELYHEQLLRAGLTMAPLEPEGS

SEQ ID NO: 1693 - protein, 95 aa, Thermosynechococcus elongatus
ASVVPQERQQVTRKHYPNYKVIVLNDDFNTIQHVVACLKKYIPNMISDRAWELTNQVHYGGRAIVWVGPQEQAELYHEQLLRAGLTMAPLEPEGS

SEQ ID NO: 1694 - protein, 95 aa, Thermosynechococcus elongatus
ASVVPQERQQVTRKHYPNYKVIVLNDDFNTYRHVAACLMKYIPNMTSDRAWELTNQVHYKGQAIVWVGPQEQAELNHEQLLRAGLTMAPLEPEGS

SEQ ID NO: 1695 - protein, 95 aa, Thermosynechococcus elongatus
ASVVPQERQQVTRKHYPNYKVIVLNDDFNTLRHVAACLMKYIPNMTSDRAWELTNQVHYKGQAIVWVGPQEQAELNHEQLLRAGLTMAPLEPEGS

SEQ ID NO: 1696 - protein, 95 aa, Thermosynechococcus elongatus
ASVVPQERQQVTRKHYPNYKVIVLNDDFNTFQHVAACLMKYIPNKTSDRAWELTNQVHYEGQAIVWVGPQEQAELYHEQLLRAGLTMAPLEPEGS

SEQ ID NO: 1697 - protein, 95 aa, Thermosynechococcus elongatus
ASVVPQERQQVTRKHYPNYKVIVLNDDFNTFQHVAACLMKYIPNMTSDRAWELTNQVHYGGRAIVWVGPQEQAELYHEQLLRAGLTMAPLEPEGS

SEQ ID NO: 1698 - protein, 95 aa, Thermosynechococcus elongatus
ASVVPQERQQVTRKHYPNYKVIVLNDDFNTFQHVVPCLKKYIPNMISDRAWELTNQVHYGGRAIVWVGPQEQAELYHEQLLRAGLTMAPLEPEGS

SEQ ID NO: 1699 - protein, 95 aa, Thermosynechococcus elongatus
ASVVPQERQQVTRKHYPNYKVIVLNDDFNTFQHVVECLKKYIPNMISDRAWELTNKVHYGGRAIVWVGPQEQAELYHEQLLRAGLTMAPLEPEGS

SEQ ID NO: 1700 - protein, 95 aa, Thermosynechococcus elongatus; identical to SEQ ID NO: 1222

SEQ ID NO: 1701 - protein, 95 aa, Thermosynechococcus elongatus
ASVVPQERQQVTRKHYPNYKVIVLNDDFNTFQHVVACLKKYIPNMISDRAWELTNQVHYGGRAIVWVGPQEQAELNHEQLLRAGLTMAPLEPEGS

SEQ ID NO: 1702 - protein, 95 aa, Thermosynechococcus elongatus
ASVVPQERQQVTRKHYPNYKVIVLNDDFNTFQHVVACLKKYIPNMISDRAWELTNQVHYGGRAIVWVGPQEQAELYHEQLLRASLTMAPLEPEGS

SEQ ID NO: 1703 - protein, 95 aa, Thermosynechococcus elongatus
ASVVPQERQQVTRKHYPNYKVIVLNDDFNTFQHVVACLKKYIPNMISDRAWELTNQVHYGGRAIVWVGPQEQAELYREQLLRAGLTMAPLEPEGS

SEQ ID NO: 1704 - protein, 95 aa, Thermosynechococcus elongatus
ASVVPQERQQVTRKHYPNYKVIVLNDDFNTFQHVVACLKKYIPNMISDRAWELTNQVHYGGRAIVWVGPQVQAELYHEQLLRAGLTMAPLEPEGS

SEQ ID NO: 1705 - protein, 95 aa, Thermosynechococcus elongatus
ASVVPQERQQVTRKHYPNYKVIVLNDDFNTFQHVVACLKKYIPNMISDRAWELTNQVHYGGLAIVWVGPQEQAELYHEQLLRAGLTMAPLEPEGS

SEQ ID NO: 1706 - protein, 95 aa, Thermosynechococcus elongatus
ASVVPQERQQVTRKHYPNYKVIVLNDDFNTFQHVVACLKKYIPNMISDRAWELTNQVHYVGQAIVWVGPQEQAELYHEQLLRAGLTMAPLEPKGS

SEQ ID NO: 1707 - protein, 95 aa, Thermosynechococcus elongatus
ASVVPQERQQVTRKHYPNYKVIVLNDDFNTFQHFVACLKKYIPNMISDRAWELTNQVHYGGRAIVWVGPQEQAELYHEQLLRAGLTMAPLEPEGS

SEQ ID NO: 1708 - protein, 95 aa, Thermosynechococcus elongatus
ASVVPQERQQVTRKHYPNYKVIVLNDDFNTFRHDAACLMKYIPNMTSDRAWELTNQVHYKGQAIVWVGPQEQAELNHEQLLRAGLTMAPLEPEGS

SEQ ID NO: 1709 - protein, 95 aa, Thermosynechococcus elongatus; identical to SEQ ID NO: 5

SEQ ID NO: 1710 - protein, 95 aa, Thermosynechococcus elongatus; identical to SEQ ID NO: 5

SEQ ID NO: 1711 - protein, 95 aa, Thermosynechococcus elongatus
ASVVPQERQQVTRKHYPNYKVIVLNDDFNTFRHVTACLMKYIPNMTSDRAWELTNQVHYKGQAIVWVGPQEQAELNHEQLLRAGLTMAPLEPEGS

SEQ ID NO: 1712 - protein, 95 aa, Thermosynechococcus elongatus
ASVVPQERQQVTRKHYPNYKVIVLNDDFNTFRHVAACLKKYIPNMISDRAWELTNQVHYGGRAIVWVGPQEQAELNHEQLLRAGLTMAPLEPEGS

SEQ ID NO: 1713 - protein, 95 aa, Thermosynechococcus elongatus
ASVVPQERQQVTRKHYPNYKVIVLNDDFNTFRHVAACLKKYIPNMTSDRAWELTNQVHYKGQAIVWVGPQEQAELNHEQLLRAGLTMAPLEPEGS

SEQ ID NO: 1714 - protein, 40 aa, Thermosynechococcus elongatus
ASVVPQERQQVTRKHYPNYKVIVLNDDFNTFRHVAACLMK

SEQ ID NO: 1715 - protein, 95 aa, Thermosynechococcus elongatus; identical to SEQ ID NO: 5

SEQ ID NO: 1716 - protein, 95 aa, Thermosynechococcus elongatus; identical to SEQ ID NO: 1656

SEQ ID NO: 1717 - protein, 95 aa, Thermosynechococcus elongatus; identical to SEQ ID NO: 34

SEQ ID NO: 1718 - protein, 95 aa, Thermosynechococcus elongatus
ASVVPQERQQVTRKHYPNYKVIVLNDDFNTFRHVAACLMKYIPNKTSDRAWELTNQVHYEGQAIVWVGPQVQAELYHEQLLRAGLTMAPLEPEGS

SEQ ID NO: 1719 - protein, 95 aa, Thermosynechococcus elongatus
ASVVPQERQQVTRKHYPNYKVIVLNDDFNTFRHVAACLMKYIPNKTSDRAWEFTNQVHYEGQAIVWVGPQEQAELYHEQLLRTGLTMAPLEPEGS

SEQ ID NO: 1720 - protein, 95 aa, Thermosynechococcus elongatus; identical to SEQ ID NO: 47

SEQ ID NO: 1721 - protein, 95 aa, Thermosynechococcus elongatus; identical to SEQ ID NO: 58

SEQ ID NO: 1722 - protein, 95 aa, Thermosynechococcus elongatus; identical to SEQ ID NO: 55

SEQ ID NO: 1723 - protein, 95 aa, Thermosynechococcus elongatus; identical to SEQ ID NO: 15

SEQ ID NO: 1724 - protein, 95 aa, Thermosynechococcus elongatus
ASVVPQERQQVTRKHYPNYKVIVLNDDFNTFRHVAACLMKYIPNMTSDRAWELTNQVHYEGQAIVWDGPQEQAELYHEQLLRAGLTMAPLEPEGS

SEQ ID NO: 1725 - protein, 95 aa, Thermosynechococcus elongatus
ASVVPQERQQVTRKHYPNYKVIVLNDDFNTFRHVAACLMKYIPNMTSDRAWELTNQVHYEGQAIVWVGPQEQAELYHEQWLRAGLTMAPLEPEGS

SEQ ID NO: 1726 - protein, 95 aa, Thermosynechococcus elongatus
ASVVPQERQQVTRKHYPNYKVIVLNDDFNTFRHVAACLMKYIPNMTSDRAWELTNQVHYEGQAIVWVGPQEQAELYHEQLLRTGLTMAPLEQEGS

SEQ ID NO: 1727 - protein, 95 aa, Thermosynechococcus elongatus
ASVVPQERQQVTRKHYPNYKVIVLNDDFNTFRHVAACLMKYIPNMTSDRAWELTNQVHYEGQAIVWVGPQEQAELYHEQLLRAGLTMATLEPEGS

SEQ ID NO: 1728 - protein, 95 aa, Thermosynechococcus elongatus
ASVVPQERQQVTRKHYPNYKVIVLNDDFNTFRHVAACLMKYIPNMTSDRAWELTNQVHYEGQAIVWVGPQEQAELYHEQLLRAGLTMAPLEPDGS

SEQ ID NO: 1729 - protein, 95 aa, Thermosynechococcus elongatus
ASVVPQERQQVTRKHYPNYKVIVLNDDFNTFRHVAACLMKYIPNMTSDRAWELTNQVHYEGQAIVWVGPQEQAELYHEQLLRACLTMAPLEPEGS

SEQ ID NO: 1730 - protein, 95 aa, Thermosynechococcus elongatus
ASVVPQERQQVTRKHYPNYKVIVLNDDFNTFRHVAACLMKYIPNMTSDRAWELTNQVHYEGQAIVWVGPQEQAELYHDQLLRAGLTMAPLEPEGS

SEQ ID NO: 1731 - protein, 95 aa, Thermosynechococcus elongatus
ASVVPQERQQVTRKHYPNYKVIVLNDDFNTFRHVAACLMKYIPNMTSDRAWELTNQVHYEGQAIVWVGPQERAELYHEQLLRAGLTMAPLEPEGS

SEQ ID NO: 1732 - protein, 95 aa, Thermosynechococcus elongatus; identical to SEQ ID NO: 87

SEQ ID NO: 1733 - protein, 95 aa, Thermosynechococcus elongatus
ASVVPQERQQVTRKHYPNYKVIVLNDDFNTFRHVAACLMKYIPNMTSDRAWELTNQVHYEGQSIVWVGPQVQAELYHEQLLRAGLTMAPLEPGGS

SEQ ID NO: 1734 - protein, 95 aa, Thermosynechococcus elongatus; identical to SEQ ID NO: 47

SEQ ID NO: 1735 - protein, 95 aa, Thermosynechococcus elongatus; identical to SEQ ID NO: 778

SEQ ID NO: 1736 - protein, 95 aa, Thermosynechococcus elongatus
ASVVPQERQQVTRKHYPNYKVIVLNDDFNTFRHVAACLMKYIPNMTSDRAWELTNQVHYVGQAIVWVGPQEQAELYHEQLLRAGLTMAPLEPEGS

SEQ ID NO: 1737 - protein, 95 aa, Thermosynechococcus elongatus
ASVVPQERQQVTRKHYPNYKVIVLNDDFNTFRHVAACLMKYIPNMISDRAWELTNQVHYGGRAIVWVGPQVQAELYHEQLLRAGLTMAPLEPGGS

SEQ ID NO: 1738 - protein, 95 aa, Thermosynechococcus elongatus
ASVVPQERQQVTRKHYPNYKVIVLNDDFNTFRHVAACLMKYIPNMTSDRAWELTNQVNYKGQAIVWVGPQEQAELNHEQLLRAGLTMAPLEPEGS

SEQ ID NO: 1739 - protein, 95 aa, Thermosynechococcus elongatus
ASVVPQERQQVTRKHYPNYKVIVLNDDFNTFRHVAACLMKYIPNMTSDRAWELTNQVHYKGQDIVWVGPQEQAELNHEQLLRAGLTMAPLEPEGS

SEQ ID NO: 1740 - protein, 95 aa, Thermosynechococcus elongatus
ASVVPQERQQVTRKHYPNYKVIVLNDDFNTFRHVAACLMKYIPNMTSDRAWELTNQVHYKGQAIVWDGPQEQAELNHEQLLRAGLTMAPLEPEGS

SEQ ID NO: 1741 - protein, 95 aa, Thermosynechococcus elongatus
ASVVPQERQQVTRKHYPNYKVIVLNDDFNTFRHVAACLMKYIPNMTSDRAWELTNQVHYKGQAIVWVGTQEQAELNHEQLLRAGLTMAPLEPEGS

SEQ ID NO: 1742 - protein, 95 aa, Thermosynechococcus elongatus
ASVVPQERQQVTRKHYPNYKVIVLNDDFNTFRHVAACLMKYIPNMTSDRAWELTNQVHYKGQAIVWVGPQEQAELNHEQMLRAGLTMAPLEPEGS

SEQ ID NO: 1743 - protein, 79 aa, Thermosynechococcus elongatus
ASVVPQERQQVTRKHYPNYKVIVLNDDFNTFRHVAACLMKYIPNMTSDRAWELTNQVHYKGQAIVWVGPQEQAELNHEQ

SEQ ID NO: 1744 - protein, 95 aa, Thermosynechococcus elongatus
ASVVPQERQQVTRKHYPNYKVIVLNDDFNTFRHVAACLMKYIPNMTSDRAWELTNQVHYKGQAIVWVGPQEQAELNHEQFLRAGLTMAPLEPEGS

SEQ ID NO: 1745 - protein, 95 aa, Thermosynechococcus elongatus; identical to SEQ ID NO: 1744

SEQ ID NO: 1746 - protein, 95 aa, Thermosynechococcus elongatus
ASVVPQERQQVTRKHYPNYKVIVLNDDFNTFRHVAACLMKYIPNMTSDRAWELTNQVHYKGQAIVWVGPQEQAELNHEQLWRAGLTMAPLEPEGS

SEQ ID NO: 1747 - protein, 95 aa, Thermosynechococcus elongatus
ASVVPQERQQVTRKHYPNYKVIVLNDDFNTFRHVAACLMKYIPNMTSDRAWELTNQVHYKGQAIVWVGPQEQAELNHEQLLRAGLTMAPMEPEGS

SEQ ID NO: 1748 - protein, 95 aa, Thermosynechococcus elongatus
ASVVPQERQQVTRKHYPNYKVIVLNDDFNTFRHVAACLMKYIPNMTSDRAWELTNQVHYKGQAIVWVGPQEQAELNHEQLLRAGLTMAPLEPERS

SEQ ID NO: 1749 - protein, 95 aa, Thermosynechococcus elongatus
ASVVPQERQQVTRKHYPNYKVIVLNDDFNTFRHVAACLMKYIPNMTSDRAWELTNQVHYKGQAIVWVGPQEQAELNHEQLLRAGLTMAPLEPDGS

SEQ ID NO: 1750 - protein, 92 aa, Thermosynechococcus elongatus
ASVVPQERQQVTRKHYPNYKVIVLNDDFNTFRHVAACLMKYIPNMTSDRAWELTNQVHYKGQAIVWVGPQEQAELNHEQLLRAGLTMAPLEP

SEQ ID NO: 1751 - protein, 95 aa, Thermosynechococcus elongatus; identical to SEQ ID NO: 5

SEQ ID NO: 1752 - protein, 90 aa, Thermosynechococcus elongatus
ASVVPQERQQVTRKHYPNYKVIVLNDDFNTFRHVAACLMKYIPNMTSDRAWELTNQVHYKGQAIVWVGPQEQAELNHEQLLRAGLTMAPL

SEQ ID NO: 1753 - protein, 95 aa, Thermosynechococcus elongatus
ASVVPQERQQVTRKHYPNYKVIVLNDDFNTFRHVAACLMKYIPNMTSDRAWELTNQVHYKGQAIVWVGPQEQAELNHEQLLRAGLTMSPLEPEGS

SEQ ID NO: 1754 - protein, 95 aa, Thermosynechococcus elongatus
ASVVPQERQQVTRKHYPNYKVIVLNDDFNTFRHVAACLMKYIPNMTSDRAWELTNQVHYKGQAIVWVGPQEQAELNHEQLLRAGLTLAPLEPEGS

SEQ ID NO: 1755 - protein, 95 aa, Thermosynechococcus elongatus
ASVVPQERQQVTRKHYPNYKVIVLNDDFNTFRHVAACLMKYIPNMTSDRAWELTNQVHYKGQAIVWVGPQEQAELNHEQLLRAGFTMAPLEPEGS

SEQ ID NO: 1756 - protein, 95 aa, Thermosynechococcus elongatus
ASVVPQERQQVTRKHYPNYKVIVLNDDFNTFRHVAACLMKYIPNMTSDRAWELTNQVHYKGQAIVWVGPQEQAELNHEQLLIAGLTMAPLEPEGS

SEQ ID NO: 1757 - protein, 81 aa, Thermosynechococcus elongatus
ASVVPQERQQVTRKHYPNYKVIVLNDDFNTFRHVAACLMKYIPNMTSDRAWELTNQVHYKGQAIVWVGPQEQAELNHEQLL

SEQ ID NO: 1758 - protein, 95 aa, Thermosynechococcus elongatus
ASVVPQERQQVTRKHYPNYKVIVLNDDFNTFRHVAACLMKYIPNMTSDRAWELTNQVHYKGQAIVWVGPQEQAELNHDQLLRAGLTMAPLEPEGS

SEQ ID NO: 1759 - protein, 95 aa, Thermosynechococcus elongatus
ASVVPQERQQVTRKHYPNYKVIVLNDDFNTFRHVAACLMKYIPNMTSDRAWELTNQVHYKGQAIVWVGPQEQAELYHKQLLRAGLTMAPLEPEGS

SEQ ID NO: 1760 - protein, 95 aa, Thermosynechococcus elongatus
ASVVPQERQQVTRKHYPNYKVIVLNDDFNTFRHVAACLMKYIPNMTSDRAWELTNQVHYKGQAIVWVGPQEQAELYHEQLLRTGLTMAPLEPEGS

SEQ ID NO: 1761 - protein, 73 aa, Thermosynechococcus elongatus
ASVVPQERQQVTRKHYPNYKVIVLNDDFNTFRHVAACLMKYIPNMTSDRAWELTNQVHYKGQAIVWVGPQEQA

SEQ ID NO: 1762 - protein, 70 aa, Thermosynechococcus elongatus
ASVVPQERQQVTRKHYPNYKVIVLNDDFNTFRHVAACLMKYIPNMTSDRAWELTNQVHYKGQAIVWVGPQ

SEQ ID NO: 1763 - protein, 95 aa, Thermosynechococcus elongatus
ASVVPQERQQVTRKHYPNYKVIVLNDDFNTFRHVAACLMKYIPNMTSDRAWELTNQVHYKGQAIVWVGPREQAELYHEQLLRVGLTMAPLEPEGS

SEQ ID NO: 1764 - protein, 95 aa, Thermosynechococcus elongatus
ASVVPQERQQVTRKHYPNYKVIVLNDDFNTFRHVAACLMKYIPNMTSDRAWELTNQVHYKGQAIVCVGPQEQAELNHEQLLRAGLTMAPLEPEGS

SEQ ID NO: 1765 - protein, 95 aa, Thermosynechococcus elongatus; identical to SEQ ID NO: 141

SEQ ID NO: 1766 - protein, 95 aa, Thermosynechococcus elongatus
ASVVPQERQQVTRKHYPNYKVIVLNDDFNTFRHVAACLMKYIPNMTSDRAWELTNQVHYKGHAIVWVGPQEQAELNHEQLLRAGLTMAPLEPEGS

SEQ ID NO: 1767 - protein, 95 aa, Thermosynechococcus elongatus
ASVVPQERQQVTRKHYPNYKVIVLNDDFNTFRHVAACLMKYIPNMTSDRAWELTNQVHYKGRAIVWVGPQEQAELNQEQLLRAGLTMAPLEPEGS

SEQ ID NO: 1768 - protein, 95 aa, Thermosynechococcus elongatus
ASVVPQERQQVTRKHYPNYKVIVLNDDFNTFRHVAACLMKYIPNMTSDRAWELTNQVHYTGQAIVWVGPQEQAELYHEQLLRAGLTMAPLEPEGS

SEQ ID NO: 1769 - protein, 95 aa, Thermosynechococcus elongatus
ASVVPQERQQVTRKHYPNYKVIVLNDDFNTFRHVAACLMKYIPNMTSDRAWELTNQVHYIGQAIVWVGPQEQAELNHEQLLRAGLTMAPLEPEGS

SEQ ID NO: 1770 - protein, 95 aa, Thermosynechococcus elongatus
ASVVPQERQQVTRKHYPNYKVIVLNDDFNTFRHVAACLMKYIPNMTSDRAWELTNQVHYEGQAIVRVGPQEQAELYHEQLLRAGLTMAPLEPEGS

SEQ ID NO: 1771 - protein, 95 aa, Thermosynechococcus elongatus; identical to SEQ ID NO: 29

SEQ ID NO: 1772 - protein, 95 aa, Thermosynechococcus elongatus; identical to SEQ ID NO: 87

SEQ ID NO: 1773 - protein, 95 aa, Thermosynechococcus elongatus; identical to SEQ ID NO: 32

SEQ ID NO: 1774 - protein, 95 aa, Thermosynechococcus elongatus
ASVVPQERQQVTRKHYPNYKVIVLNDDFNTFRHVAACLMKYIPNMTSDRAWELTNQVHYGGRAIVWVGPQVQAELYHEQLLRAGLTMAPLEPGGS

SEQ ID NO: 1775 - protein, 95 aa, Thermosynechococcus elongatus
ASVVPQERQQVTRKHYPNYKVIVLNDDFNTFRHVAACLMKYIPNMTSDRAWELTNQVHYGGRAIVWVCPQEQAELYHEQLLRAGLTMAPLEPEGS

SEQ ID NO: 1776 - protein, 95 aa, Thermosynechococcus elongatus
ASVVPQERQQVTRKHYPNYKVIVLNDDFNTFRHVAACLMKYIPNMTSDRAWELTNQVHYGGRAIVLVGPQEQAELYHEQLLRAGLTMAPLEPEGS

SEQ ID NO: 1777 - protein, 95 aa, Thermosynechococcus elongatus; identical to SEQ ID NO: 769

SEQ ID NO: 1778 - protein, 95 aa, Thermosynechococcus elongatus
ASVVPQERQQVTRKHYPNYKVIVLNDDFNTFRHVAACLMKYIPNMTSDRAWELTNHVHYKGQAIVWVGPQEQAELNHEQLLRAGLTMAPLEPEGS

SEQ ID NO: 1779 - protein, 95 aa, Thermosynechococcus elongatus
ASVVPQERQQVTRKHYPNYKVIVLNDDFNTFRHVAACLMKYIPNMTSDRAWEFTNQVHYKGQAIVWVGPQEQAELNHEQLLRAGLTMAPLEPEGS

SEQ ID NO: 1780 - protein, 95 aa, Thermosynechococcus elongatus
ASVVPQERQQVTRKHYPNYKVIVLNDDFNTFRHVAACLMKYIPNMTSDRAWDLTNQVHYKGQAIVWVGPQEQAELNHEQLLRAGLTMAPLEPEGS

SEQ ID NO: 1781 - protein, 95 aa, Thermosynechococcus elongatus
ASVVPQERQQVTRKHYPNYKVIVLNDDFNTFRHVAACLMKYIPNMTSDRAWVLTNQVHYKGQAIVWVGPQEQAELNHEQLLRAGLTMAPLEPEGS

SEQ ID NO: 1782 - protein, 51 aa, Thermosynechococcus elongatus
ASVVPQERQQVTRKHYPNYKVIVLNDDFNTFRHVAACLMKYIPNMTSDRAW

SEQ ID NO: 1783 - protein, 95 aa, Thermosynechococcus elongatus
ASVVPQERQQVTRKHYPNYKVIVLNDDFNTFRHVAACLMKYIPNMTSDRSWELTNQVHYKGQAIVWVGPQEQAELNHEQLLRAGLTMAPLEPEGS

SEQ ID NO: 1784 - protein, 95 aa, Thermosynechococcus elongatus; identical to SEQ ID NO: 5

SEQ ID NO: 1785 - protein, 95 aa, Thermosynechococcus elongatus; identical to SEQ ID NO: 85

SEQ ID NO: 1786 - protein, 95 aa, Thermosynechococcus elongatus
ASVVPQERQQVTRKHYPNYKVIVLNDDFNTFRHVAACLMKYIPNMASDRAWELTNQVHYKGQAIVWVGPQEQAELNHEQLLRAGLTMAPLEPEGS

SEQ ID NO: 1787 - protein, 95 aa, Thermosynechococcus elongatus; identical to SEQ ID NO: 5

SEQ ID NO: 1788 - protein, 95 aa, Thermosynechococcus elongatus
ASVVPQERQQVTRKHYPNYKVIVLNDDFNTFRHVVACLKKYIPNMISDRAWELTNQVHYEGQAIVRVGPQEQAELYHKQLLRAGLTMAPLEPEGS

SEQ ID NO: 1789 - protein, 95 aa, Thermosynechococcus elongatus
ASVVPQERQQVTRKHYPNYKVIVLNDDFNTFRHVVACLMKYIPNMTSDRAWELTNQVHYEGQAIVWVGPQEQAELYHEQLLRAGLTMAPLEPEGS

SEQ ID NO: 1790 - protein, 95 aa, Thermosynechococcus elongatus
ASVVPQERQQVTRKHYPNYKVIVLNDDFNTFRRVAACLMKYIQNMTSDRAWELTNQVHYGGRAIVWVGPQEQAELYHEQLLRAGLTMAPLEPEGS

SEQ ID NO: 1791 - protein, 95 aa, Thermosynechococcus elongatus
ASVVPQERQQVTRKHYPNYKVIVLNDDFYTFRHVAACLMKYIPNMTSDRAWELTNQVHYKGQAIVWVGPQEQAELNHEQLLRAGLTMAPLEPEGS

SEQ ID NO: 1792 - protein, 95 aa, Thermosynechococcus elongatus; identical to SEQ ID NO: 5

SEQ ID NO: 1793 - protein, 95 aa, Thermosynechococcus elongatus
ASVVPQERQQVTRKHYPNYKVIVLNDYFNTFRHVAACLMKYIPNMTSDRAWELTNQVHYEGQAIVWVGPQEQAELYHEQLLRTGLTMAPLEPEGS

SEQ ID NO: 1794 - protein, 95 aa, Thermosynechococcus elongatus
ASVVPQERQQVTRKHYPNYKVIVLNYDFNTFRHVAACLMKYIPNMTSDRAWELTNQVHYKGQAIVWVGPQEQAELNHEQLLRAGLTMAPLEPEGS

SEQ ID NO: 1795 - protein, 95 aa, Thermosynechococcus elongatus
ASVVPQERQQVTRKHYPNYKVIVLSDDFNTFRHVAACLMKYIPNMTSDRAWELTNQVHYKGQAIVWVGPQEQAELNHEQLLRAGLTMAPLEPEGS

SEQ ID NO: 1796 - protein, 95 aa, Thermosynechococcus elongatus
ASVVPQERQQVTRKHYPNYKVLVLNDDFNTFRHVAACLMKYIPNMTSDRAWELTNQVHYKGQAIVWVGPQEQAELNHEQLLRAGLTMAPLEPEGS

SEQ ID NO: 1797 - protein, 95 aa, Thermosynechococcus elongatus
ASVVPQERQQVTRKHYPNYKVVVLNDDSNTFQHVAACLMKYVPNMTSDRAWELTNQVHYEGQAIVWVGPQEQAELYHEQLLRAGLTMAPLEPEGS

SEQ ID NO: 1798 - protein, 95 aa, Thermosynechococcus elongatus
ASVVPQERQQVTRKHYPNCKVIVLNDDFNTFRHVAACLMKYIPNMTSDRAWELTNQVHYKGQAIVWVGPQEQAELNHEQLLRAGLTMAPLEPEGS

SEQ ID NO: 1799 - protein, 95 aa, Thermosynechococcus elongatus
ASVVPQERQQVTRKHCPNYKVIVLNDDFNTFRHVAACLMKYIPNMTSDRAWELTNQVHYEGQAIVWVGPQEQAELYHEQLLRTGLTMAPLEPEGS

SEQ ID NO: 1800 - protein, 95 aa, Thermosynechococcus elongatus
ASVVPQERQQVTSKHYPNYKVIVLNDDFNTFQHVVACLKKYIPNMISDRAWELTNQVHYEGQAIVWVGPQEQAELYHEQLLRAGLTMAPLEPEGS

SEQ ID NO: 1801 - protein, 95 aa, Thermosynechococcus elongatus
ASVVPQERQQVTSKHYPNYKVIVLNDDFNTFRHVAACLMKYIPNKTSDRAWELTNQVHYEGQAIVWVGPQEQAELYHEQLLRAGLTMAPLEPEGS

SEQ ID NO: 1802 - protein, 95 aa, Thermosynechococcus elongatus
ASVVPQERQQVTSKHYPNYKVIVLNDDFNTFRHVAACLMKYIPNMTSDRAWELTNQVHYKGQAIVWVGPQEQAELNHEQLLRAGLTMAPLEPEGS

SEQ ID NO: 1803 - protein, 95 aa, Thermosynechococcus elongatus
ASVVPQERQQVTSKHYPNYKVIVLNDDFNTFRHVAACLMKYIPNMTSDRAWELTNQVHYEGQAIVWVGPQEQAELYHEQLLRTGLTMAPLEPGGS

SEQ ID NO: 1804 - protein, 95 aa, Thermosynechococcus elongatus
ASVVPQERQQVTSKHYPNYKVIVLNDDFNTFRHVAACLMKYIPNMTSDRAWELTNQVHYEGQAIVWVGPQEQAELYHEQLLRAGLTMATLEPEGS

SEQ ID NO: 1805 - protein, 95 aa, Thermosynechococcus elongatus
ASVVPQERQQVTIKHYPNYKVIVLNDDFNTFRHVAACLMKYIPNKTSDRAWELTNQVHYEGQAIVWVGPQEQAELYHEQLLRAGLTMAPLEPEGS

SEQ ID NO: 1806 - protein, 95 aa, Thermosynechococcus elongatus
ASVVPQERQQVTIKHYPNYKVIVLNDDFNTFRHVAACLMKYIPNMTSDRAWELTNQVHYKGQAIVWVGPQEQAELNHEQLLRAGLTMAPLEPEGS

SEQ ID NO: 1807 - protein, 95 aa, Thermosynechococcus elongatus
ASVVPQERQQVTGKHYPNYKVIVLNDDFNTFRHVAACLMKYIPNMTSDRAWELTNQVHYKGQAIVWVGPQEQAELNHEQLLRAGLTMAPLEPEGS

SEQ ID NO: 1808 - protein, 95 aa, Thermosynechococcus elongatus
ASVVPQERQQVPRKHYPNYKVIVLNDDFNTFRHVAACLMKYIPNMTSDRAWELTNQVHYKGQAIVWVGPQEQAELNHEQLLRAGLTMAPLEPEGS

SEQ ID NO: 1809 - protein, 95 aa, Thermosynechococcus elongatus
ASVVPQERQQVARKHYPKYKVIVLNDDFNTFRHVAACLMKYIPNMTSDRAWELTNQVHYKGQAIVWVGPQEQAELNHEQLLRAGLTMAPLEPEGS

SEQ ID NO: 1810 - protein, 95 aa, Thermosynechococcus elongatus; identical to SEQ ID NO: 446

SEQ ID NO: 1811 - protein, 95 aa, Thermosynechococcus elongatus
ASVVPQERQQVARKHYPNYKVIVLNDDFNTFQHVAACLMKYIPNMTSDRAWELTNQVHYEGQAIVWVGPQEQAELYHEQLLRAGLTMAPLEPGGS

SEQ ID NO: 1812 - protein, 95 aa, Thermosynechococcus elongatus
ASVVPQERQQVARKHYPNYKVIVLNDDFNTFQHVAACLMKYIPNMTSDRAWELTNQVHYVGQAIVWVGPQEQAELNHEQLLRAGLTMAPLEPEGS

SEQ ID NO: 1813 - protein, 95 aa, Thermosynechococcus elongatus; identical to SEQ ID NO: 1812

SEQ ID NO: 1814 - protein, 95 aa, Thermosynechococcus elongatus
ASVVPQERQQVARKHYPNYKVIVLNDDFNTFQHVAACLMKYIPNMTSDRAWELTNQVHYVGQAIVWVGPQEQAELYHEQLLRAGLTRAPLEPKGS

SEQ ID NO: 1815 - protein, 95 aa, Thermosynechococcus elongatus; identical to SEQ ID NO: 104

SEQ ID NO: 1816 - protein, 95 aa, Thermosynechococcus elongatus
ASVVPQERQQVARKHYPNYKVIVLNDDFNTFQHVAACLMKYIPNMTSDRAWELTNQVHYVGQAIVWVGPQVQAELYHEQLLRAGLTMAPLEPGGS

SEQ ID NO: 1817 - protein, 95 aa, Thermosynechococcus elongatus
ASVVPQERQQVARKHYPNYKVIVLNDDFNTFQHVAACLMKYIPNMTSDRAWELTNQVHYVGRAIVWVGPQEQAELYHEQLLRAGLTMAPLEPEGS

SEQ ID NO: 1818 - protein, 95 aa, Thermosynechococcus elongatus
ASVVPQERQQVARKHYPNYKVIVLNDDFNTFQHVAACLMKYIPNMTSDRAWELTNQVHYVCQAIVWVGPQEQAELYHEQLLRAGLTMAPLEPKGS

SEQ ID NO: 1819 - protein, 95 aa, Thermosynechococcus elongatus; identical to SEQ ID NO: 783

SEQ ID NO: 1820 - protein, 95 aa, Thermosynechococcus elongatus; identical to SEQ ID NO: 242

SEQ ID NO: 1821 - protein, 95 aa, Thermosynechococcus elongatus; identical to SEQ ID NO: 1254

SEQ ID NO: 1822 - protein, 95 aa, Thermosynechococcus elongatus; identical to SEQ ID NO: 232

SEQ ID NO: 1823 - protein, 95 aa, Thermosynechococcus elongatus; identical to SEQ ID NO: 35

SEQ ID NO: 1824 - protein, 95 aa, Thermosynechococcus elongatus; identical to SEQ ID NO: 38

SEQ ID NO: 1825 - protein, 95 aa, Thermosynechococcus elongatus
ASVVPQERQQYTRKHYPNYKVIVLNDDFNTFRHVAACLMKYIPNKTSDRAWELTNQVHYEGQAIVWVGPQEQAELYHEQLLRAGLTMAPLEPEGS

SEQ ID NO: 1826 - protein, 95 aa, Thermosynechococcus elongatus
ASVVPQERQHDTRKHYPNYKVIVLNDDFNTFRHVAACLMKYIPNKTSDRAWELTNQVHYEGQAIVWVGPQEQAELYHEQLLRAGLTMAPLEPEGS

SEQ ID NO: 1827 - protein, 95 aa, Thermosynechococcus elongatus
ASVVPQERQHDTRKHYPNYKVIVLNDDFNTFRHVAACLMKYIPNMTSDRAWELTNQVHYEGQAIVWVGPQEQAELYHEQLLRAGLTMAPLEPEGS

SEQ ID NO: 1828 - protein, 95 aa, Thermosynechococcus elongatus
ASVVPQERQRDTRKHYPNYKVIVLNDDFNTFRHVAACLMKYIPNMTSDRAWELTNQVHYEGQAIVWVGPQEQAELYHEQLLRAGLTMAPLEPEGS

SEQ ID NO: 1829 - protein, 95 aa, Thermosynechococcus elongatus
ASVVPQERQLVTRKHYPNYKVIVLNVDFNTFLHVAACLMKYIPNMTSDRAWELTNQVHYEGQAIVWVGPQEQAELYHEQLLRAGLTMAPLEPEGS

SEQ ID NO: 1830 - protein, 9 aa, Thermosynechococcus elongatus
ASVVPQERQ

SEQ ID NO: 1831 - protein, 9 aa, Thermosynechococcus elongatus
ASVVPQERQ

SEQ ID NO: 1832 - protein, 95 aa, Thermosynechococcus elongatus
ASVVPQERRQVARKHYPNYKVIVLNDDFNTFRHVAACLMKYIPNMTSDRAWELTNQVHYEGQAIVWVGPQVQAELYHEQLLRAGLTMAPLEPGGS

SEQ ID NO: 1833 - protein, 95 aa, Thermosynechococcus elongatus
ASVVPQEREQDTRKHYPNYKVIVLNDDFNTFRHVAACLMKYIPNMTSDRAWELTNQVHYEGQAIVWVGPQEQAELYHEQLLRAGLTMAPLEPEGS

SEQ ID NO: 1834 - protein, 12 aa, Thermosynechococcus elongatus
ASVVPQERTASY

SEQ ID NO: 1835 - protein, 95 aa, Thermosynechococcus elongatus; identical to SEQ ID NO: 2

SEQ ID NO: 1836 - protein, 95 aa, Thermosynechococcus elongatus
ASVVPQEIQQVARKHYPNYKVIVLNDDFNTFRHVAACLMKYIPNMTSDRAWELTNQVHYEGQAIVWVGPQEQAELNHEQLLRAGLTMAPLEPEGS

SEQ ID NO: 1837 - protein, 95 aa, Thermosynechococcus elongatus
ASVVPQEIQQVTRKHYPNYKVIVLNDDFNTFRHVAACLMKYIPNMTSDRAWELTNQVHYEGQAIVWVGPQEQAELYHEQLLRAGLTMAPLEPEGS

SEQ ID NO: 1838 - protein, 95 aa, Thermosynechococcus elongatus
ASVVPQEIQQVARKHYPNYKVIVLNDDFNTFQHVAACLMKYIPNMTSDRAWELTNQVHYVGQAIVWVGPQEQAELYHEQLLRAGLTMAPLEPKGS

SEQ ID NO: 1839 - protein, 95 aa, Thermosynechococcus elongatus
ASVVPQEGQQVARKHYPNYKVIILNDDFNTFQHVAACLMKYIPNMTSDRAWELTNQVHYEGQAIVRVGPQEQAELYHKQLLRAGLTMAPLEPEGS

SEQ ID NO: 1840 - protein, 95 aa, Thermosynechococcus elongatus; identical to SEQ ID NO: 495

SEQ ID NO: 1841 - protein, 95 aa, Thermosynechococcus elongatus
ASVVPQEGQQVARKHYPNYKVIVLNDDFNTFRHVAACLMKYIPNMTSDRAWELTNQVHYGGRAIVWVGPQEQAELYHEQLLRAGLTMAPLEPEGS

SEQ ID NO: 1842 - protein, 95 aa, Thermosynechococcus elongatus; identical to SEQ ID NO: 202

SEQ ID NO: 1843 - protein, 95 aa, Thermosynechococcus elongatus
ASVVPQEGQQDTRKHYPNYKVIVLNDDFNTFRHVAACLMKYIPNKTSDRAWELTNQVHYEGQAIVWVGPQEQAELYHEQLLRAGLTMAQLEPEGS

SEQ ID NO: 1844 - protein, 95 aa, Thermosynechococcus elongatus
ASVVPQEGQQDTRKHYPNYKVIVLNDDFNTFRHVAACLMKYIPNKTSDRAWELTNQVHYGGRAIVWVGPQEQAELYHEQLLRAGLTMAPLEPEGS

SEQ ID NO: 1845 - protein, 95 aa, Thermosynechococcus elongatus; identical to SEQ ID NO: 787

SEQ ID NO: 1846 - protein, 95 aa, Thermosynechococcus elongatus
ASVVPQEGQQDTRKHYPNYKVIVLNDDFNTFRHVAACLMKYIPNMTSDRAWELTNQVHYEGQAIVWVGPQEQAELNHEQLLRAGLTMAPLEPEGS

SEQ ID NO: 1847 - protein, 95 aa, Thermosynechococcus elongatus
ASVVPQEGQQDTRKHYPNYKVIVLNDDFNTFRHVAACLMKYIPNMTSDRAWELTNQVHYEGQAIVWVGPQVQAELYHEQLLRAGLTMAPLEPEGS

SEQ ID NO: 1848 - protein, 95 aa, Thermosynechococcus elongatus
ASVVPQEGQQDTRKHYPNYKVIVLNDDFNTFRHVAACLMKYIPNMTSDRAWELTNQVHYEGQAIVWVGPREQAELYHEQLLRVGLTMAPLEPEGS

SEQ ID NO: 1849 - protein, 95 aa, Thermosynechococcus elongatus
ASVVPQEGQQDTRKHYPNYKVIVLNDDFNTFRHVAACLMKYIPNMISDRAWELTNQVHYGGRAIVWVGPQEQAELYHEQLLRAGLTMAPLEPEGS

SEQ ID NO: 1850 - protein, 95 aa, Thermosynechococcus elongatus; identical to SEQ ID NO: 1

SEQ ID NO: 1851 - protein, 95 aa, Thermosynechococcus elongatus
ASVVPQEGQQVNRKHYPNYKVIVLNDDFNTFQHVVACLKKYIPNMISDRAWELTNQVHYGGRAIVWVGPQEQAELYHEQLLRAGLTMAPLEPEGS

SEQ ID NO: 1852 - protein, 95 aa, Thermosynechococcus elongatus; identical to SEQ ID NO: 1

SEQ ID NO: 1853 - protein, 95 aa, Thermosynechococcus elongatus
ASVVPQEGQQVTRKNYPNYKVIVLNDDFNTFQHVVACLKKYIPNMISDRAWELTNQVHYGGRAIVWVGPQEQAELYHEQLLRAGLTMAPLEPEGS

SEQ ID NO: 1854 - protein, 95 aa, Thermosynechococcus elongatus; identical to SEQ ID NO: 137

SEQ ID NO: 1855 - protein, 95 aa, Thermosynechococcus elongatus
ASVVPQEGQQVTRKHHPNYKVIVLNDDFNTFQHVVACLKKYIPNMISDRAWELTNQVHYGGRAIVWVGPQEQAELYHEQLLRAGLTMAPLEPEGS

SEQ ID NO: 1856 - protein, 95 aa, Thermosynechococcus elongatus; identical to SEQ ID NO: 137

SEQ ID NO: 1857 - protein, 95 aa, Thermosynechococcus elongatus
ASVVPQEGQQVTRKHYTNYKVIVLNDDFNTFRHVAACLMKYIPNMTSDRAWELTNQVHYEGQAIVWVGPQEQAELYHEQLLRAGLTMAPLEPEGS

SEQ ID NO: 1858 - protein, 95 aa, Thermosynechococcus elongatus
ASVVPQEGQQVTRKHYPKYKVIVLNDDFNTFQHVVACLKKYIPNMISDRAWELTNQVHYGGRAIVWVGPQEQAELYHEQLLRAGLTMAPLEPEGS

SEQ ID NO: 1859 - protein, 95 aa, Thermosynechococcus elongatus; identical to SEQ ID NO: 20

SEQ ID NO: 1860 - protein, 95 aa, Thermosynechococcus elongatus
ASVVPQEGQQVTRKHYPNYKDIVLNDDFNTFQHVVACLKKYIPNMISDRAWELTNQVHYGGRAIVWVGPQEQAELYHEQLLRAGLTMAPLEPGGS

SEQ ID NO: 1861 - protein, 95 aa, Thermosynechococcus elongatus; identical to SEQ ID NO: 1

SEQ ID NO: 1862 - protein, 95 aa, Thermosynechococcus elongatus; identical to SEQ ID NO: 252

SEQ ID NO: 1863 - protein, 95 aa, Thermosynechococcus elongatus
ASVVPQEGQQVTRKHYPNYKVIDLNDDFNTFQHVVACLKKYIPNMISDRAWELTNQVHYGGRAIVWVGPQEQAELYHEQLLRAGLTMAPLEPEGS

SEQ ID NO: 1864 - protein, 95 aa, Thermosynechococcus elongatus
ASVVPQEGQQVTRKHYPNYKVIGLNDDFNTFQHVVACLKKYIPNMISDRAWELTNQVHYGGRAIVWVGPQEQAELYHEQLLRAGLTMAPLEPEGS

SEQ ID NO: 1865 - protein, 95 aa, Thermosynechococcus elongatus; identical to SEQ ID NO: 1

SEQ ID NO: 1866 - protein, 95 aa, Thermosynechococcus elongatus; identical to SEQ ID NO: 11

SEQ ID NO: 1867 - protein, 23 aa, Thermosynechococcus elongatus
ASVVPQEGQQVTRKHYPNYKVIV

SEQ ID NO: 1868 - protein, 95 aa, Thermosynechococcus elongatus
ASVVPQEGQQVTRKHYPNYKVIVLKDDFNTFQHVVACLKKYIPNMISDRAWELTNQVHYGGRAIVWVGPQEQAELYHEQLLRAGLTMAPLEPEGS

SEQ ID NO: 1869 - protein, 95 aa, Thermosynechococcus elongatus
ASVVPQEGQQVTRKHYPNYKVIVLNDEFNTFRHVAACLMKYIPNMTSDRAWELTNQVHYEGQAIVWVGPQEQAELYHEQLLRAGLTMAPLEPEGS

SEQ ID NO: 1870 - protein, 95 aa, Thermosynechococcus elongatus
ASVVPQEGQQVTRKHYPNYKVIVLNDDLNTFQHVVACLKKYIPNMISDRAWELTNQVHYGGRAIVWVGPQEQAELYHEQLLRAGLTMAPLEPEGS

SEQ ID NO: 1871 - protein, 95 aa, Thermosynechococcus elongatus
ASVVPQEGQQVTRKHYPNYKVIVLNDDSNTFQHVVACLKKYIPNMISDRAWELTNQVHYGGRAIVWVGPQEQAELYHEQLLRAGLTMAPLEPEGS

SEQ ID NO: 1872 - protein, 95 aa, Thermosynechococcus elongatus; identical to SEQ ID NO: 1870

SEQ ID NO: 1873 - protein, 95 aa, Thermosynechococcus elongatus; identical to SEQ ID NO: 1

SEQ ID NO: 1874 - protein, 95 aa, Thermosynechococcus elongatus
ASVVPQEGQQVTRKHYPNYKVIVLNDDFNTYQHVFACLKKYIPNMISDRAWELTNQVHYGGRAIVWVGPQEQAELYHEQLLRAGLTMAPLEPEGS

SEQ ID NO: 1875 - protein, 95 aa, Thermosynechococcus elongatus
ASVVPQEGQQVTRKHYPNYKVIVLNDDFNTFQNVVACLKKYIPNMISDRAWELTNQVHYGGRAIVWVGPQEQAELYHEQLLRAGLTMAPLEPEGS

SEQ ID NO: 1876 - protein, 95 aa, Thermosynechococcus elongatus
ASVVPQEGQQVTRKHYPNYKVIVLNDDFNTFQHLVACLKKYIPNMISDRAWELTNQVHYGGRAIVWVGPQEQAELYHGQLLRAGLTMAPLEPEGS

SEQ ID NO: 1877 - protein, 95 aa, Thermosynechococcus elongatus; identical to SEQ ID NO: 190

SEQ ID NO: 1878 - protein, 95 aa, Thermosynechococcus elongatus; identical to SEQ ID NO: 1

SEQ ID NO: 1879 - protein, 95 aa, Thermosynechococcus elongatus
ASVVPQEGQQVTRKHYPNYKVIVLNDDFNTFQHVDACLKKYIPNMISDRAWELTNQVHYGGRAIVWVGPQEQAELYHEQLLRAGLTMAPLEPEGS

SEQ ID NO: 1880 - protein, 95 aa, Thermosynechococcus elongatus
ASVVPQEGQQVTRKHYPNYKVIVLNDDFNTFQHVAACLMKYIPNKTSDRAWELTNQVHYEGQAIVWVGPQEQAELNHEQLLRAGLTMAPLEPEGS

SEQ ID NO: 1881 - protein, 95 aa, Thermosynechococcus elongatus
ASVVPQEGQQVTRKHYPNYKVIVLNDDFNTFQHVAACLMKYIPNMTSDRAWELTNQVHYEGQAIVWVGPQEQAELYHEQLLRAGMTMAPLEPEGS

SEQ ID NO: 1882 - protein, 95 aa, Thermosynechococcus elongatus; identical to SEQ ID NO: 123

SEQ ID NO: 1883 - protein, 95 aa, Thermosynechococcus elongatus; identical to SEQ ID NO: 271

SEQ ID NO: 1884 - protein, 95 aa, Thermosynechococcus elongatus
ASVVPQEGQQVTRKHYPNYKVIVLNDDFNTFQHVAACLMKYIPNMISDRAWELTNQVHYGGRAIVWVGPQEQAELYHEQLLRAGLTMAPLEPEGS

SEQ ID NO: 1885 - protein, 95 aa, Thermosynechococcus elongatus; identical to SEQ ID NO: 606

SEQ ID NO: 1886 - protein, 95 aa, Thermosynechococcus elongatus; identical to SEQ ID NO: 1

SEQ ID NO: 1887 - protein, 37 aa, Thermosynechococcus elongatus; identical to SEQ ID NO: 609

SEQ ID NO: 1888 - protein, 95 aa, Thermosynechococcus elongatus; identical to SEQ ID NO: 1

SEQ ID NO: 1889 - protein, 95 aa, Thermosynechococcus elongatus
ASVVPQEGQQVTRKHYPNYKVIVLNDDFNTFQHVVACLKKHIPNMISDRAWELTNQVHYGGRAIVWVGPQEQAELYHEQLLRAGLTMAPLEPEGS

SEQ ID NO: 1890 - protein, 95 aa, Thermosynechococcus elongatus
ASVVPQEGQQVTRKHYPNYKVIVLNDDFNTFQHVVACLKKYIPKMISDRAWELTNQVHYGGRAIVWVGPQEQAELYHEQLLRAGLTMAPLEPEGS

SEQ ID NO: 1891 - protein, 95 aa, Thermosynechococcus elongatus; identical to SEQ ID NO: 94

SEQ ID NO: 1892 - protein, 95 aa, Thermosynechococcus elongatus; identical to SEQ ID NO: 50

SEQ ID NO: 1893 - protein, 95 aa, Thermosynechococcus elongatus
ASVVPQEGQQVTRKHYPNYKVIVLNDDFNTFQHVVACLKKYIPNMTSDRAWELTNQVHYEGRAIVWVGPQEQAELYHEQLLRAGLTMAPLEPEGS

SEQ ID NO: 1894 - protein, 95 aa, Thermosynechococcus elongatus
ASVVPQEGQQVTRKHYPNYKVIVLNDDFNTFQHVVACLKKYIPNMTSDRAWELTNQVHYECQAIVWVGPQEQAELYHEQLLRAGLTMAPLEPEGS

SEQ ID NO: 1895 - protein, 95 aa, Thermosynechococcus elongatus; identical to SEQ ID NO: 1

SEQ ID NO: 1896 - protein, 95 aa, Thermosynechococcus elongatus; identical to SEQ ID NO: 1

SEQ ID NO: 1897 - protein, 95 aa, Thermosynechococcus elongatus
ASVVPQEGQQVTRKHYPNYKVIVLNDDFNTFQHVVACLKKYIPNMISDKAWELTNQVHYGGRAIVWVGPQEQAELYHEQLLRAGLTMAPLEPEGS

SEQ ID NO: 1898 - protein, 95 aa, Thermosynechococcus elongatus
ASVVPQEGQQVTRKHYPNYKVIVLNDDFNTFQHVVACLKKYIPNMISDRARELTNQVHYGGRAIVWVGPQEQAELYHEQLLRAGLTMAPLEPEGS

SEQ ID NO: 1899 - protein, 95 aa, Thermosynechococcus elongatus
ASVVPQEGQQVTRKHYPNYKVIVLNDDFNTFQHVVACLKKYIPNMISDRAWELTNQDHYGGRAIVWVGPQEQAELYHEQLLRAGLTMAPLEPEGS

SEQ ID NO: 1900 - protein, 95 aa, Thermosynechococcus elongatus
ASVVPQEGQQVTRKHYPNYKVIVLNDDFNTFQHVVACLKKYIPNMISDRAWELTNQVHYEGQAIVRVGPQEQAELYHEQLLRAGLTMAPLEPEGS

SEQ ID NO: 1901 - protein, 95 aa, Thermosynechococcus elongatus
ASVVPQEGQQVTRKHYPNYKVIVLNDDFNTFQHVVACLKKYIPNMISDRAWELTNQVHYEGQAIVWVGPQEQAELYHKQLLRAGLTMAPLEPEGS

SEQ ID NO: 1902 - protein, 95 aa, Thermosynechococcus elongatus
ASVVPQEGQQVTRKHYPNYKVIVLNDDFNTFQHVVACLKKYIPNMISDRAWELTNQVHYEGQAIVWVGPQEQAELYHEHLLRAGLTMAPLEPEGS

SEQ ID NO: 1903 - protein, 70 aa, Thermosynechococcus elongatus
ASVVPQEGQQVTRKHYPNYKVIVLNDDFNTFQHVVACLKKYIPNMISDRAWELTNQVHYEGQAIVWVGPQ

SEQ ID NO: 1904 - protein, 95 aa, Thermosynechococcus elongatus; identical to SEQ ID NO: 1128

SEQ ID NO: 1905 - protein, 95 aa, Thermosynechococcus elongatus
ASVVPQEGQQVTRKHYPNYKVIVLNDDFNTFQHVVACLKKYIPNMISDRAWELTNQVHYGGQAIVRVGPQEQAELYHEQLLRAGLTMAPLEPEGS

SEQ ID NO: 1906 - protein, 95 aa, Thermosynechococcus elongatus; identical to SEQ ID NO: 81

SEQ ID NO: 1907 - protein, 95 aa, Thermosynechococcus elongatus; identical to SEQ ID NO: 1

SEQ ID NO: 1908 - protein, 95 aa, Thermosynechococcus elongatus
ASVVPQEGQQVTRKHYPNYKVIVLNDDFNTFQHVVACLKKYIPNMISDRAWELTNQVHYGGRATVWVGPQEQAELYHEQLLRAGLTMAPLEPEGS

SEQ ID NO: 1909 - protein, 95 aa, Thermosynechococcus elongatus; identical to SEQ ID NO: 49

SEQ ID NO: 1910 - protein, 95 aa, Thermosynechococcus elongatus; identical to SEQ ID NO: 1

SEQ ID NO: 1911 - protein, 95 aa, Thermosynechococcus elongatus
ASVVPQEGQQVTRKHYPNYKVIVLNDDFNTFQHVVACLKKYIPNMISDRAWELTNQVHYGGRAIVRVGPQEQAELYHEQLLRAGLTMAPLEPEGS

SEQ ID NO: 1912 - protein, 95 aa, Thermosynechococcus elongatus
ASVVPQEGQQVTRKHYPNYKVIVLNDDFNTFQHVVACLKKYIPNMISDRAWELTNQVHYGGRAIVWAGPQEQAELYHEQLLRAGLTMAPLEPEGS

SEQ ID NO: 1913 - protein, 95 aa, Thermosynechococcus elongatus
ASVVPQEGQQVTRKHYPNYKVIVLNDDFNTFQHVVACLKKYIPNMISDRAWELTNQVHYGGRAIVWVDPQEQAELYHEQLLRAGLTMAPLEPEGS

SEQ ID NO: 1914 - protein, 95 aa, Thermosynechococcus elongatus; identical to SEQ ID NO: 1

SEQ ID NO: 1915 - protein, 95 aa, Thermosynechococcus elongatus
ASVVPQEGQQVTRKHYPNYKVIVLNDDFNTFQHVVACLKKYIPNMISDRAWELTNQVHYGGRAIVWVGPQEQAELHHEQLLRAGLTMAPLEPEGS

SEQ ID NO: 1916 - protein, 95 aa, Thermosynechococcus elongatus
ASVVPQEGQQVTRKHYPNYKVIVLNDDFNTFQHVVACLKKYIPNMISDRAWELTNQVHYGGRAIVWVGPQEQAELYHEKLLRAGLTMAPLEPEGS

SEQ ID NO: 1917 - protein, 95 aa, Thermosynechococcus elongatus
ASVVPQEGQQVTRKHYPNYKVIVLNDDFNTFQHVVACLKKYIPNMISDRAWELTNQVHYGGRAIVWVGPQEQAELYHEQMLRAGLTMAPLEPEGS

SEQ ID NO: 1918 - protein, 95 aa, Thermosynechococcus elongatus
ASVVPQEGQQVTRKHYPNYKVIVLNDDFNTFQHVVACLKKYIPNMISDRAWELTNQVHYGGRAIVWVGPQEQAELYHEQSLRAGLTMDPLEPEGS

SEQ ID NO: 1919 - protein, 95 aa, Thermosynechococcus elongatus
ASVVPQEGQQVTRKHYPNYKVIVLNDDFNTFQHVVACLKKYIPNMISDRAWELTNQVHYGGRAIVWVGPQEQAELYHEQLMRAGLTMAPLEPEGS

SEQ ID NO: 1920 - protein, 80 aa, Thermosynechococcus elongatus
ASVVPQEGQQVTRKHYPNYKVIVLNDDFNTFQHVVACLKKYIPNMISDRAWELTNQVHYGGRAIVWVGPQEQAELYHEQL

SEQ ID NO: 1921 - protein, 95 aa, Thermosynechococcus elongatus; identical to SEQ ID NO: 1

SEQ ID NO: 1922 - protein, 95 aa, Thermosynechococcus elongatus
ASVVPQEGQQVTRKHYPNYKVIVLNDDFNTFQHVVACLKKYIPNMISDRAWELTNQVHYGGRAIVWVGPQEQAELYHEQLLRAGLNMAPLEPEGS

SEQ ID NO: 1923 - protein, 95 aa, Thermosynechococcus elongatus; identical to SEQ ID NO: 110

SEQ ID NO: 1924 - protein, 95 aa, Thermosynechococcus elongatus; identical to SEQ ID NO: 273

SEQ ID NO: 1925 - protein, 95 aa, Thermosynechococcus elongatus; identical to SEQ ID NO: 257

SEQ ID NO: 1926 - protein, 95 aa, Thermosynechococcus elongatus; identical to SEQ ID NO: 1

SEQ ID NO: 1927 - protein, 95 aa, Thermosynechococcus elongatus; identical to SEQ ID NO: 1146

SEQ ID NO: 1928 - protein, 95 aa, Thermosynechococcus elongatus; identical to SEQ ID NO: 1

SEQ ID NO: 1929 - protein, 95 aa, Thermosynechococcus elongatus
ASVVPQEGQQVTRKHYPNYKVIVLNDDFNTFQHVVACLKKYIPNMISDRAWELTNQVHYGGRAIVWVGPQEQAELYHEQLLRAGLTMAPLVPVGS

SEQ ID NO: 1930 - protein, 95 aa, Thermosynechococcus elongatus
ASVVPQEGQQVTRKHYPNYKVIVLNDDFNTFQHVVACLKKYIPNMISDRAWELTNQVHYGGRAIVWVGPQEQAELYHEQLLRAGLTMAPLDPEGS

SEQ ID NO: 1931 - protein, 95 aa, Thermosynechococcus elongatus
ASVVPQEGQQVTRKHYPNYKVIVLNDDFNTFQHVVACLKKYIPNMISDRAWELTNQVHYGGRAIVWVGPQEQAELYHEQLLRAGLTMALLEPEGS

SEQ ID NO: 1932 - protein, 95 aa, Thermosynechococcus elongatus
ASVVPQEGQQVTRKHYPNYKVIVLNDDFNTFQHVVACLKKYIPNMISDRAWELTNQVHYGGRAIVWVGPQEQAELYHEQLLRAGLTMASLEPEGS

SEQ ID NO: 1933 - protein, 95 aa, Thermosynechococcus elongatus
ASVVPQEGQQVTRKHYPNYKVIVLNDDFNTFQHVVACLKKYIPNMISDRAWELTNQVHYGGRAIVWVGPQEQAELYHEQLLRAGLTMVPLEPEGS

SEQ ID NO: 1934 - protein, 95 aa, Thermosynechococcus elongatus; identical to SEQ ID NO: 274

SEQ ID NO: 1935 - protein, 95 aa, Thermosynechococcus elongatus; identical to SEQ ID NO: 274

SEQ ID NO: 1936 - protein, 95 aa, Thermosynechococcus elongatus
ASVVPQEGQQVTRKHYPNYKVIVLNDDFNTFQHVVACLKKYIPNMISDRAWELTNQVHYGGRAIVWVGPQEQAELYHEQLLRAGLAMAPLEPEGS

SEQ ID NO: 1937 - protein, 95 aa, Thermosynechococcus elongatus; identical to SEQ ID NO: 371

SEQ ID NO: 1938 - protein, 95 aa, Thermosynechococcus elongatus
ASVVPQEGQQVTRKHYPNYKVIVLNDDFNTFQHVVACLKKYIPNMISDRAWELTNQVHYGGRAIVWVGPQEQAELYHEQLLSAGLTMAPLEPEGS

SEQ ID NO: 1939 - protein, 95 aa, Thermosynechococcus elongatus; identical to SEQ ID NO: 622

SEQ ID NO: 1940 - protein, 95 aa, Thermosynechococcus elongatus; identical to SEQ ID NO: 1139

SEQ ID NO: 1941 - protein, 95 aa, Thermosynechococcus elongatus; identical to SEQ ID NO: 1

SEQ ID NO: 1942 - protein, 95 aa, Thermosynechococcus elongatus
ASVVPQEGQQVTRKHYPNYKVIVLNDDFNTFQHVVACLKKYIPNMISDRAWELTNQVHYGGRAIVWVGPQEQAELYHDQLLRAGLTMAPLEPEGS

SEQ ID NO: 1943 - protein, 95 aa, Thermosynechococcus elongatus; identical to SEQ ID NO: 1

SEQ ID NO: 1944 - protein, 95 aa, Thermosynechococcus elongatus; identical to SEQ ID NO: 624

SEQ ID NO: 1945 - protein, 95 aa, Thermosynechococcus elongatus
ASVVPQEGQQVTRKHYPNYKVIVLNDDFNTFQHVVACLKKYIPNMISDRAWELTNQVHYGGRAIVWVGPQELAELYHEQLLRAGLTMAPLEPEGS

SEQ ID NO: 1946 - protein, 71 aa, Thermosynechococcus elongatus
ASVVPQEGQQVTRKHYPNYKVIVLNDDFNTFQHVVACLKKYIPNMISDRAWELTNQVHYGGRAIVWVGPQE

SEQ ID NO: 1947 - protein, 95 aa, Thermosynechococcus elongatus
ASVVPQEGQQVTRKHYPNYKVIVLNDDFNTFQHVVACLKKYIPNMISDRAWELTNQVHYGGRAIVWVGPHEQAELYHEQLLRAGLTMAPLEPEGS

SEQ ID NO: 1948 - protein, 95 aa, Thermosynechococcus elongatus; identical to SEQ ID NO: 625

SEQ ID NO: 1949 - protein, 95 aa, Thermosynechococcus elongatus; identical to SEQ ID NO: 1

SEQ ID NO: 1950 - protein, 95 aa, Thermosynechococcus elongatus
ASVVPQEGQQVTRKHYPNYKVIVLNDDFNTFQHVVACLKKYIPNMISDRAWELTNQVHYGGRAIVWVVPQEQAELYHEQLLRAGLTMAPLEPEGS

SEQ ID NO: 1951 - protein, 95 aa, Thermosynechococcus elongatus; identical to SEQ ID NO: 1

SEQ ID NO: 1952 - protein, 95 aa, Thermosynechococcus elongatus
ASVVPQEGQQVTRKHYPNYKVIVLNDDFNTFQHVVACLKKYIPNMISDRAWELTNQVHYGGRAVVWVGPQEQAELYHEQLLRAGLTMAPLEPEGS

SEQ ID NO: 1953 - protein, 95 aa, Thermosynechococcus elongatus
ASVVPQEGQQVTRKHYPNYKVIVLNDDFNTFQHVVACLKKYIPNMISDRAWELTNQVHYGGLAIVWVGPQVQAELYHEQLLRAGLTMAPLEPGGS

SEQ ID NO: 1954 - protein, 61 aa, Thermosynechococcus elongatus; identical to SEQ ID NO: 820

SEQ ID NO: 1955 - protein, 95 aa, Thermosynechococcus elongatus; identical to SEQ ID NO: 1

SEQ ID NO: 1956 - protein, 95 aa, Thermosynechococcus elongatus
ASVVPQEGQQVTRKHYPNYKVIVLNDDFNTFQHVVACLKKYIPNMISDRAWELTNQVHYVGQAIVWVGPQEQAELYHEQLLRAGLTMAPLEPEGS

SEQ ID NO: 1957 - protein, 95 aa, Thermosynechococcus elongatus; identical to SEQ ID NO: 276

SEQ ID NO: 1958 - protein, 95 aa, Thermosynechococcus elongatus
ASVVPQEGQQVTRKHYPNYKVIVLNDDFNTFQHVVACLKKYIPNMISDRAWELTNQVHYVGLAIVWVGPQVQAELYHEQLLRAGLTMAPLEPGGS

SEQ ID NO: 1959 - protein, 59 aa, Thermosynechococcus elongatus; identical to SEQ ID NO: 373

SEQ ID NO: 1960 - protein, 95 aa, Thermosynechococcus elongatus; identical to SEQ ID NO: 22

SEQ ID NO: 1961 - protein, 95 aa, Thermosynechococcus elongatus
ASVVPQEGQQVTRKHYPNYKVIVLNDDFNTFQHVVACLKKYIPNMISDRAWELTIQVHYGGRAIVWVGPQEQAELYHEQLLRAGLTMAPLEPEGS

SEQ ID NO: 1962 - protein, 95 aa, Thermosynechococcus elongatus
ASVVPQEGQQVTRKHYPNYKVIVLNDDFNTFQHVVACLKKYIPNMISDRAWGLTNQVHYGGRAIVWVGPQEQAELYHEQLLRAGLTMAPLEPEGS

SEQ ID NO: 1963 - protein, 95 aa, Thermosynechococcus elongatus
ASVVPQEGQQVTRKHYPNYKVIVLNDDFNTFQHVVACLKKYIPNMISDRALELTNQVHYGGRAIVWVGPQVQAELYHEQLLRAGLTMAPLEPGGS

SEQ ID NO: 1964 - protein, 95 aa, Thermosynechococcus elongatus
ASVVPQEGQQVTRKHYPNYKVIVLNDDFNTFQHVVACLKKYIPNMISDSAWELTNQVHYGGRAIVWVGPQEQAELYHEQLLRAGLTMAPLEPEGS

SEQ ID NO: 1965 - protein, 95 aa, Thermosynechococcus elongatus; identical to SEQ ID NO: 634

SEQ ID NO: 1966 - protein, 95 aa, Thermosynechococcus elongatus
ASVVPQEGQQVTRKHYPNYKVIVLNDDFNTFQHVVACLKKYIPNMIFDRAWELTNQVHYGGRAIVWVGTQEQAELYHEQLLRAGLTMAPLEPEGS

SEQ ID NO: 1967 - protein, 95 aa, Thermosynechococcus elongatus; identical to SEQ ID NO: 1

SEQ ID NO: 1968 - protein, 95 aa, Thermosynechococcus elongatus
ASVVPQEGQQVTRKHYPNYKVIVLNDDFNTFQHVVACLKKYIANMISDRAWELTNQVHYGGRAIVWVGPQEQAELYHEQLLRAGLTMAPLEPEGS

SEQ ID NO: 1969 - protein, 95 aa, Thermosynechococcus elongatus
ASVVPQEGQQVTRKHYPNYKVIVLNDDFNTFQHVVACLKKYVPNMISDRAWELTNQVHYGGRAIVWVGPQEQAELYHEQLLRAGLTMAPLEPEGS

SEQ ID NO: 1970 - protein, 95 aa, Thermosynechococcus elongatus
ASVVPQEGQQVTRKHYPNYKVIVLNDDFNTFQHVVACLMKYIPNKTSDRAWELTNQVHYEGQAIVWVGPQEQAELYHEQLLRAGLTMAPLEPGGS

SEQ ID NO: 1971 - protein, 95 aa, Thermosynechococcus elongatus
ASVVPQEGQQVTRKHYPNYKVIVLNDDFNTFQHVVACLMKYIPNKTSDRAWELTNQVHYVGQAIVWVGPQERAELYHEQLLRAGLTMAPLEPEGS

SEQ ID NO: 1972 - protein, 95 aa, Thermosynechococcus elongatus; identical to SEQ ID NO: 120

SEQ ID NO: 1973 - protein, 95 aa, Thermosynechococcus elongatus
ASVVPQEGQQVTRKHYPNYKVIVLNDDFNTFQHVVACLMKYIPNMTSDRAWELTNQVHYEGQAIVWVGPQVQAELYHEQLLRAGLTMAPLEPEGS

SEQ ID NO: 1974 - protein, 95 aa, Thermosynechococcus elongatus
ASVVPQEGQQVTRKHYPNYKVIVLNDDFNTFQHVVACLMKYIPNMTSDRAWELTNQVHYVGQAIVWVGPQEQAELYHEQLLRAGLTMAPLEPKGS

SEQ ID NO: 1975 - protein, 95 aa, Thermosynechococcus elongatus; identical to SEQ ID NO: 70

SEQ ID NO: 1976 - protein, 95 aa, Thermosynechococcus elongatus
ASVVPQEGQQVTRKHYPNYKVIVLNDDFNTFQHVVAFLKKYIPNMISDRAWELTNQVHYEGQAIVWVGPQEQAELYHEQLLRAGLTMAPLEPEGS

SEQ ID NO: 1977 - protein, 95 aa, Thermosynechococcus elongatus
ASVVPQEGQQVTRKHYPNYKVIVLNDDFNTFQLVVACLKKYIPNMISDRAWELTNQVHYGGRAIVWVGPQEQAELYHEQLLRAGLTMAPLEPEGS

SEQ ID NO: 1978 - protein, 95 aa, Thermosynechococcus elongatus
ASVVPQEGQQVTRKHYPNYKVIVLNDDFNTFRHDAACLMKYIPNMTSDRAWELTNQVHYEGQAIVWVGPQEQAELYHEQLLRAGLTMAPLEPEGS

SEQ ID NO: 1979 - protein, 36 aa, Thermosynechococcus elongatus
ASVVPQEGQQVTRKHYPNYKVIVLNDDFNTFRHVAA

SEQ ID NO: 1980 - protein, 95 aa, Thermosynechococcus elongatus
ASVVPQEGQQVTRKHYPNYKVIVLNDDFNTFRHVAACLKKYIPNMISDRAWELTNQVHYEGQAIVWVGPQVQAELYHEQLLRAGLTMAPLEPGGS

SEQ ID NO: 1981 - protein, 95 aa, Thermosynechococcus elongatus
ASVVPQEGQQVTRKHYPNYKVIVLNDDFNTFRHVAACLMKYIQNMTSDRAWELTNQVHYEGQAIVWVGPQEQAELYHEQLLRAGLTMAPLEPEGS

SEQ ID NO: 1982 - protein, 95 aa, Thermosynechococcus elongatus; identical to SEQ ID NO: 23

SEQ ID NO: 1983 - protein, 95 aa, Thermosynechococcus elongatus
ASVVPQEGQQVTRKHYPNYKVIVLNDDFNTFRHVAACLMKYIPNKTSDRAWELTNQVHYEGQAIVWVGPQEQAELNHEQLLRAGLTMAPLEPEGS

SEQ ID NO: 1984 - protein, 95 aa, Thermosynechococcus elongatus
ASVVPQEGQQVTRKHYPNYKVIVLNDDFNTFRHVAACLMKYIPNKTSDRAWELTNQVHYEGQAIVWVGPQEQAELYHEQLLRDGLTMAPLEPEGS

SEQ ID NO: 1985 - protein, 95 aa, Thermosynechococcus elongatus; identical to SEQ ID NO: 17

SEQ ID NO: 1986 - protein, 95 aa, Thermosynechococcus elongatus; identical to SEQ ID NO: 278

SEQ ID NO: 1987 - protein, 95 aa, Thermosynechococcus elongatus
ASVVPQEGQQVTRKHYPNYKVIVLNDDFNTFRHVAACLMKYIPNMTSDRAWELTNQVHYEGKAIVWVGPQEQAELYHEQLLRAGLTMAPLEPEGS

SEQ ID NO: 1988 - protein, 95 aa, Thermosynechococcus elongatus
ASVVPQEGQQVTRKHYPNYKVIVLNDDFNTFRHVAACLMKYIPNMTSDRAWELTNQVHYEGQAIVWVGPQEKAELYHEQLLRAGLTMAPLEPEGS

SEQ ID NO: 1989 - protein, 77 aa, Thermosynechococcus elongatus
ASVVPQEGQQVTRKHYPNYKVIVLNDDFNTFRHVAACLMKYIPNMTSDRAWELTNQVHYEGQAIVWVGPQEQAELYH

SEQ ID NO: 1990 - protein, 95 aa, Thermosynechococcus elongatus
ASVVPQEGQQVTRKHYPNYKVIVLNDDFNTFRHVAACLMKYIPNMTSDRAWELTNQVHYEGQAIVWVGPQEQAVLYHEQLLRAGLTMAPLEPEGS

SEQ ID NO: 1991 - protein, 95 aa, Thermosynechococcus elongatus
ASVVPQEGQQVTRKHYPNYKVIVLNDDFNTFRHVAACLMKYIPNMTSDRAWELTNQVHYEGQAIVWVGPQVQAELYHEQLLRAGLNMAPLEPGGS

SEQ ID NO: 1992 - protein, 95 aa, Thermosynechococcus elongatus
ASVVPQEGQQVTRKHYPNYKVIVLNDDFNTFRHVAACLMKYIPNMTSDRAWELTNQVHYEGQAIVWVGPQVQAELYHEQLLRAGLTIAPLEPGGS

SEQ ID NO: 1993 - protein, 95 aa, Thermosynechococcus elongatus; identical to SEQ ID NO: 20

SEQ ID NO: 1994 - protein, 95 aa, Thermosynechococcus elongatus
ASVVPQEGQQVTRKHYPNYKVIVLNDDFNTFRHVAACLMKYIPNMTSDRAWELTNQVHYEGQAIVWVCPQVQAELYHEQLLRAGLTMAPLEPGGS

SEQ ID NO: 1995 - protein, 95 aa, Thermosynechococcus elongatus
ASVVPQEGQQVTRKHYPNYKVIVLNDDFNTFRHVAACLMKYIPNMTSDRAWELTNQVHYEGQAIVCVGPQEQAELYHEQLLRAGLTMAPLEPEGS

SEQ ID NO: 1996 - protein, 95 aa, Thermosynechococcus elongatus
ASVVPQEGQQVTRKHYPNYKVIVLNDDFNTFRHVAACLMKYIPNMTSDRAWELTNQVHYEGLAIVWVGPQEQAELYHEQLLRAGLTMAPLEPEGS

SEQ ID NO: 1997 - protein, 95 aa, Thermosynechococcus elongatus
ASVVPQEGQQVTRKHYPNYKVIVLNDDFNTFRHVAACLMKYIPNMTSDRAWELTNQVHYAGQAIVWVGPQVQAELYHEQLLRAGLTMAPLEPGGS

SEQ ID NO: 1998 - protein, 95 aa, Thermosynechococcus elongatus
ASVVPQEGQQVTRKHYPNYKVIVLNDDFNTFRHVAACLMKYIPNMTSDRAWELTNQVHYGGRAIVWVGPQEQAELNHEQLLRAGLTMAPLEPEGS

SEQ ID NO: 1999 - protein, 95 aa, Thermosynechococcus elongatus
ASVVPQEGQQVTRKHYPNYKVIVLNDDFNTFRHVAACLMKYIPNMTSDRAWDLTNQVHYEGQAIVWVGPQEQAELYHEQLLRAGLTMAPLEPEGS

SEQ ID NO: 2000 - protein, 95 aa, Thermosynechococcus elongatus
ASVVPQEGQQVTRKHYPNYKVIVLNDDFNTFRHVAACLMKYIPNMTSDRAWELTNQVHYKGQAIAWVGPQEQAELNHEQLLRAGLTMAPLEPEGS

SEQ ID NO: 2001 - protein, 95 aa, Thermosynechococcus elongatus; identical to SEQ ID NO: 278

SEQ ID NO: 2002 - protein, 95 aa, Thermosynechococcus elongatus
ASVVPQEGQQVTRKHYPNYKVIVLNDDFNTFRHVAACLMKYIPNMTSDRAWELTNQVHYKGQAIVWVGPQVQAELYHEQLLRAGLTMAPLEPGGS

SEQ ID NO: 2003 - protein, 95 aa, Thermosynechococcus elongatus; identical to SEQ ID NO: 93

SEQ ID NO: 2004 - protein, 95 aa, Thermosynechococcus elongatus; identical to SEQ ID NO: 332

SEQ ID NO: 2005 - protein, 95 aa, Thermosynechococcus elongatus; identical to SEQ ID NO: 17

SEQ ID NO: 2006 - protein, 95 aa, Thermosynechococcus elongatus
ASVVPQEGQQVTRKHYPNYKVIVLNGDFNTFQHVVACLKKYIPNMISDRAWELTNQVHYGGRAIVWVGPQEQAELYHEQLLRAGLTMAPLEPEGS

SEQ ID NO: 2007 - protein, 95 aa, Thermosynechococcus elongatus
ASVVPQEGQQVTRKHYPNYKVIVLSDDFNTFRHVAACLMKYIPNMTSDRAWELTNQVHYEGQAIVWVGPQEQAELYHEQLLRAGLTMAPLEPEGS

SEQ ID NO: 2008 - protein, 95 aa, Thermosynechococcus elongatus
ASVVPQEGQQVTRKHYPNYKVIVFNDDFNTFRHVAACLMKYIPNMTSDRAWELTNQVHYEGQAIVWVGPQVQAELYHEQLLRAGLTMAPLEPGGS

SEQ ID NO: 2009 - protein, 95 aa, Thermosynechococcus elongatus
ASVVPQEGQQVTRKHYPNYKVVVLNDDFNTFQHVVACLKKYIPNMISDRAWELTNQVHYGGRAIVWVGPQEQAELYHEQLLRAGLTMAPLEPEGS

SEQ ID NO: 2010 - protein, 95 aa, Thermosynechococcus elongatus
ASVVPQEGQQVTRKHYPNYKFIVLNDDFNTFQHVVACLKKYIPNMISDRAWELTNQVHYGGRAIVWVGPQEQAELYHEQLLRAGLTMAPLEPEGS

SEQ ID NO: 2011 - protein, 19 aa, Thermosynechococcus elongatus
ASVVPQEGQQVTRKHYPNY

SEQ ID NO: 2012 - protein, 95 aa, Thermosynechococcus elongatus
ASVVPQEGQQVTRKHYLNYKVIVLNDDFNTFQHVVACLKKYIPNMISDRAWELTNQVHYGGRAIVWVGPQEQAELYHEQLLRAGLTMAPLEPEGS

SEQ ID NO: 2013 - protein, 95 aa, Thermosynechococcus elongatus; identical to SEQ ID NO: 1

SEQ ID NO: 2014 - protein, 95 aa, Thermosynechococcus elongatus
ASVVPQEGQQVTRKHCPNYKVIVLNDDFNTFQHVVACLKKYIPNMISDRAWELTNQVHYGGRAIVWVGPQEQAELYHEQLLRAGLTMAPLEPEGS

SEQ ID NO: 2015 - protein, 95 aa, Thermosynechococcus elongatus
ASVVPQEGQQVTRKPYPNYKVIVLNDDFNTFQHVVACLKKYIPNMISDRAWELTNQVHYGGRAIVWVGPQEQAELYHEQLLRAGLTMAPLEPEGS

SEQ ID NO: 2016 - protein, 95 aa, Thermosynechococcus elongatus
ASVVPQEGQQVTRKYYPNYKVIVLNDDFNTFRHVAACLMKYIPNMTSDRAWELTNQVHYEGQAIVWVGPQVQAELYHEQLLRAGLTMAPLEPGGS

SEQ ID NO: 2017 - protein, 95 aa, Thermosynechococcus elongatus
ASVVPQEGQQVTRMHYPNYKVIVLNDDFNTFQHVVACLKKYIPNMISDRAWELTNQVHYGGRAIVWVGPQEQAELYHEQLLRAGLTMAPLEPEGS

SEQ ID NO: 2018 - protein, 95 aa, Thermosynechococcus elongatus
ASVVPQEGQQVTIKHYPNYKVIVLNDDFNTFQHVVACLKKYIPNMISDRAWESTNQVHYKGQAIVWVGPQEQAELNHEQLLRAGLTMAPLEPEGS

SEQ ID NO: 2019 - protein, 95 aa, Thermosynechococcus elongatus
ASVVPQEGQQVSRKHYPNYKVIVLNDDFNTFQHVVACLKKYIPNMISDRAWELTNQVHYGGRAIVWVGPQEQAELYHEQLLRAGLTMAPLEPEGS

SEQ ID NO: 2020 - protein, 95 aa, Thermosynechococcus elongatus
ASVVPQEGQQVARKHYPNYKVIVLNDDFNTFQHVAACLMKYIPNKTSDRAWELTNQVHYEGQAIVWVGPQEQAELYHEQLLRAGLTMAPLEPEGS

SEQ ID NO: 2021 - protein, 95 aa, Thermosynechococcus elongatus
ASVVPQEGQQVARKHYPNYKVIVLNDDFNTFQHVAACLMKYIPNMTSDRAWELTNQVHYVGQAIVWVGPQEQAELYHEQLLRAGLTMAPLEPEGS

SEQ ID NO: 2022 - protein, 95 aa, Thermosynechococcus elongatus; identical to SEQ ID NO: 839

SEQ ID NO: 2023 - protein, 95 aa, Thermosynechococcus elongatus; identical to SEQ ID NO: 495

SEQ ID NO: 2024 - protein, 95 aa, Thermosynechococcus elongatus
ASVVPQEGHQVTRKHYPNYKVIVLNDDFNTFQHVVACLKKYIPNMISDRAWELTNQVHYGGRAIVWVGPQEQAELYHEQLLRAGLTMAPLEPEGS

SEQ ID NO: 2025 - protein, 8 aa, Thermosynechococcus elongatus
ASVVPQEG

SEQ ID NO: 2026 - protein, 95 aa, Thermosynechococcus elongatus; identical to SEQ ID NO: 1

SEQ ID NO: 2027 - protein, 95 aa, Thermosynechococcus elongatus
ASVVPQDRQQDTRKHYPNYKVIVLNDDFNTFRHVAACLMKYIPNMTSDRAWELTNQVHYEGQAIVWVGPQEQAELYHEQLLRAGLTMAPLEPEGS

SEQ ID NO: 2028 - protein, 95 aa, Thermosynechococcus elongatus
ASVVPQDGQQVTRKHYPNYKVIVLNDDFNTFQHVVACLKKYIPNMISDRAWELTNQVHYGGRAIVWVGPQEQAELYHEQLLRAGLTMAPLEPEGS

SEQ ID NO: 2029 - protein, 95 aa, Thermosynechococcus elongatus
ASVVPQERQQVARKHYPNYKVIVLNDDFNTFRHVAACLMKYIPNMTPDRAWELTNQVHYEGQAIVWVGPQVQAELYHEQLLRAGLTMAPLEPGGS

SEQ ID NO: 2030 - protein, 95 aa, Thermosynechococcus elongatus
ASVVPQGRQQVARKHYPNYKVIVLNDDFNTFRHVAACLMKYIPNMTSDRAWELTNQVHYEGQAIVWVGPQVQAELYHEQLLRAGLTMAPLEPGGS

SEQ ID NO: 2031 - protein, 95 aa, Thermosynechococcus elongatus
ASVVPQGRQQVTRKHNPNYKVIVLNDDFNTFRHVAACLMKYIPNMTSDRAWELTNQVHYEGQAIVWVGPQEQAELYHEQLLRAGLTMAPLEPEGS

SEQ ID NO: 2032 - protein, 95 aa, Thermosynechococcus elongatus
ASVVPQVRQQVARKHYPNYKVIVLNDDFNTFRHVAACLMKYIPNMTSDRAWELTNQVHYEGQAIVWVGPQEQAELYHEQLLRAGLTMAPLEPEGS

SEQ ID NO: 2033 - protein, 95 aa, Thermosynechococcus elongatus
ASVVPQVRQQDTRKHYPNYKVIVLNDDFNTFRHVAACLMKYIPNMTSDRAWELTNQVHYEGQAIVWVGPQEQAELYHEQLLRAGLTMAPLEPGGS

SEQ ID NO: 2034 - protein, 95 aa, Thermosynechococcus elongatus
ASVVPQVRQQDTRKHYPNYKVIVLNDDFNTFRHVAACLMKYIPNMTSDRAWELTNQVHYEGQAIVWVGPQVQAELYHEQLLRAGLTMAPLEPGGS

SEQ ID NO: 2035 - protein, 95 aa, Thermosynechococcus elongatus
ASVVPQVRQQVTRKHYPNYKVIVLNDDFNTFQHVVACLKKYIPNMISDRAWELTNQVHYGGRAIVWVGPQEQAELYHEQLLRAGLTMAPLEPEGS

SEQ ID NO: 2036 - protein, 95 aa, Thermosynechococcus elongatus
ASVVPQVRQQVTRKHYPNYKVIVLNDDFNTFRHVAACLMKYIPNMTSDRAWELTNQVHYEGQAIVWVGPQEQAELYHEQLLRAGLTMAPLEPEGS

SEQ ID NO: 2037 - protein, 95 aa, Thermosynechococcus elongatus
ASVVPQVRQQVTRKHYPNYKVIVLNDDFNTFRHVAACLMKYIPNMTSDRAWELTNQVHYKGQAIVWVGPQEQAELNHEQLLRAGLTMAPLEPEGS

SEQ ID NO: 2038 - protein, 6 aa, Thermosynechococcus elongatus
ASVVPQ

SEQ ID NO: 2039 - protein, 6 aa, Thermosynechococcus elongatus
ASVVPQ

SEQ ID NO: 2040 - protein, 95 aa, Thermosynechococcus elongatus
ASVVPHERQQVTRKHYPNYKVIVLNDDFNTFRHVAACLMKYIPNKTSDRAWELTNQVHYEGQAIVWVGPQEQAELYHEQLLRAGLTMAPLEPEGS

SEQ ID NO: 2041 - protein, 95 aa, Thermosynechococcus elongatus; identical to SEQ ID NO: 3

SEQ ID NO: 2042 - protein, 95 aa, Thermosynechococcus elongatus; identical to SEQ ID NO: 4

SEQ ID NO: 2043 - protein, 95 aa, Thermosynechococcus elongatus
ASVVPHERQQDTRKHYPNYKVIVLNDDFNTFRHVAACLMKYIPNMTSDRAWELTNQVHYEGQAIVWVGPQEQAELYHEQLLRAGLTMAPLEPEGS

SEQ ID NO: 2044 - protein, 95 aa, Thermosynechococcus elongatus
ASVVPRERQQVARKHYPNYKVIVLNDDFNTFRHVAACLMKYIPNMTSDRAWELTNQVHYEGQAIVWVGPQVQAELYHEQLLRAGLTMAPLEPGGS

SEQ ID NO: 2045 - protein, 95 aa, Thermosynechococcus elongatus; identical to SEQ ID NO: 3

SEQ ID NO: 2046 - protein, 95 aa, Thermosynechococcus elongatus; identical to SEQ ID NO: 4

SEQ ID NO: 2047 - protein, 95 aa, Thermosynechococcus elongatus; identical to SEQ ID NO: 30

SEQ ID NO: 2048 - protein, 95 aa, Thermosynechococcus elongatus; identical to SEQ ID NO: 1

SEQ ID NO: 2049 - protein, 95 aa, Thermosynechococcus elongatus
ASVVLQERQQVARKHYPNYKVIVLNDDFNTFRHVAACLMKYIPNMTSDRAWELTNQVHYEGQAIVWVGPQVQAELYHEQLLRAGLTMAPLEPGGS

SEQ ID NO: 2050 - protein, 95 aa, Thermosynechococcus elongatus
ASVVLQERQQNTRKHYPNYKVIVLNDDFNTFRHVAACLMKYIPNKTSDRAWELTNQVHYEGQAIVWVGPQEQAELYHEQLLRAGLTMAPLEPEGS

SEQ ID NO: 2051 - protein, 95 aa, Thermosynechococcus elongatus
ASVVLQERQQDTRKHYPNYKVIVLNDDFNTFRHVAACLMKYIPNKTSDRAWELTNQVHYEGQAIVWVGPQEQAELYHEQLLRAGLTMAPLEPEGS

SEQ ID NO: 2052 - protein, 95 aa, Thermosynechococcus elongatus
ASVVSQERQQVARKHYPNYKVIVLNDDFNTFRHVAACLMKYIPNMTSDRAWELTNQVHYEGQAIVWVGPQVQAELYHEQLLRAGLTMAPLEPGGS

SEQ ID NO: 2053 - protein, 95 aa, Thermosynechococcus elongatus
ASVVSQERQQVTRKHYPNYKVIVLNDDFNTFRHVAACLMKYIPNMTSDRAWELTNQVHYKGQAIVWVGPQEQAELNHEQLLRAGLTMAPLEPEGS

SEQ ID NO: 2054 - protein, 95 aa, Thermosynechococcus elongatus; identical to SEQ ID NO: 4

SEQ ID NO: 2055 - protein, 95 aa, Thermosynechococcus elongatus; identical to SEQ ID NO: 1

SEQ ID NO: 2056 - protein, 95 aa, Thermosynechococcus elongatus; identical to SEQ ID NO: 3

SEQ ID NO: 2057 - protein, 95 aa, Thermosynechococcus elongatus
ASVLPQERQQDTRKHYPNYKVIVLNDDFNTFRHVAACLMKYIPNMTSDRAWELTNQVHYEGQAIVWVGPQEQAELYHEQLLRAGLTMAPLEPEGS

SEQ ID NO: 2058 - protein, 95 aa, Thermosynechococcus elongatus
ASVLPQERQQVTRKHYPNYKVIVLNDDFNTFRHVAACLMKYIPNMTSDRAWELTNQVHYKGQAIVWVGPQEQAELNHEQLLRAGLTMAPLEPEGS

SEQ ID NO: 2059 - protein, 95 aa, Thermosynechococcus elongatus
ASFVPQERQQDTRKHYPNYKVIVLNDDFNTFRHVAACLMKYIPNMTSDRAWELTNQVHYEGQAIVWVGPQEQAELYHEQLLRAGLTMAPLEPEGS

SEQ ID NO: 2060 - protein, 95 aa, Thermosynechococcus elongatus; identical to SEQ ID NO: 4

SEQ ID NO: 2061 - protein, 95 aa, Thermosynechococcus elongatus; identical to SEQ ID NO: 2

SEQ ID NO: 2062 - protein, 36 aa, Thermosynechococcus elongatus
ARVVPQERKQDTRKHYPNYKVIVLNDYFNTFRHVDA

SEQ ID NO: 2063 - protein, 33 aa, Thermosynechococcus elongatus
ARVVPQERQQVPRKHNPNNKLIDMNDDYNTFRH

SEQ ID NO: 2064 - protein, 43 aa, Thermosynechococcus elongatus
ARVVPQERQQVARKHYPNYKVIVMKYITNITSDRSCELNNQLH

SEQ ID NO: 2065 - protein, 95 aa, Thermosynechococcus elongatus
ARVVPQERQQVARKHYPNYKVIVLNDDFNTFRHVAACLMKYIPNMTSDRAWELTNQVHYEGQAIVWVGPQVQAELYHEQLLRAGLTMAPLEPGGS

SEQ ID NO: 2066 - protein, 75 aa, Thermosynechococcus elongatus
ARVVPQERQKDTRKHYPNYKVLVLNDDFNTFRHVVACLKKYIPNMISDRAWELTNHVHYGGRAFVWVCPHEQAEF

SEQ ID NO: 2067 - protein, 95 aa, Thermosynechococcus elongatus
ARVVPQERQQDNRKHYPNYKVIVLNDDFNTFRHVAACLMKYIPNKTSDRAWELTNQVHYEGQAIVWVGPQEQAELYHEQLLRAGLTMAPLEPEGS

SEQ ID NO: 2068 - protein, 95 aa, Thermosynechococcus elongatus
ARVVPQERQQDTRKNYPNYKVIVLNDDFNTYRHVAACLMKYIPNMTSDRAWELTNQVHYEGQAIVWVCPQEQAELYHEQLLRAGLTMAPLEPEGS

SEQ ID NO: 2069 - protein, 75 aa, Thermosynechococcus elongatus
ARVVPQERQQDTRKHYPNYKDIVLNDDFNTIRHVAACLMKYIPNKTSDRAWELTNHVLYDGQAIVLVGAQDQAEF

SEQ ID NO: 2070 - protein, 23 aa, Thermosynechococcus elongatus
ARVVPQERQQDTRKHYPNYKVIV

SEQ ID NO: 2071 - protein, 52 aa, Thermosynechococcus elongatus
ARVVPQERQQDTRKHYPNYKVIVLNDEFNTYQHVVACLKKYIPNMISDRAWE

SEQ ID NO: 2072 - protein, 95 aa, Thermosynechococcus elongatus
ARVVPQERQQDTRKHYPNYKVIVLNDDFNTIRNDAASLMNYIPHMTSDRASDLTNHVNYVGQAIVWVGPQEQAELYNEQLLRACLTLGPLETEGS

SEQ ID NO: 2073 - protein, 95 aa, Thermosynechococcus elongatus
ARVVPQERQQDTRKHYPNYKVIVLNDDFNTYRHVAACLMKYIPNKTSDRAWELTNQVNYVCLSIVWVGTQEQAELYLEQLLRAGLSMAPLEPEGS

SEQ ID NO: 2074 - protein, 95 aa, Thermosynechococcus elongatus
ARVVPQERQQDTRKHYPNYKVIVLNDDFNTFRHVAACLMKYIPNKTSDRAWELTNQVHYEGQAIVWVGQQEQAELYHEQLLRAGLSMAQLVPEGS

SEQ ID NO: 2075 - protein, 95 aa, Thermosynechococcus elongatus
ARVVPQERQQDTRKHYPNYKVIVLNDDFNTFRHVAACLMKYIPNKTSDRAWELTNQVHYEGQAIVWVCPQEQAELYHELVLRAGLTMAPLEPEGS

SEQ ID NO: 2076 - protein, 95 aa, Thermosynechococcus elongatus
ARVVPQERQQDTRKHYPNYKVIVLNDDFNTFRHVAACLMKYIPNMTSDRAWELTNQVHYEGQAIVWVGPQEQAELYHEQLLRAGLTMAPLEPGGS

SEQ ID NO: 2077 - protein, 95 aa, Thermosynechococcus elongatus
ARVVPQERQQDTRKHYPNYKVIVLNDDFNTFRHVAACLMKYIPNMTSDRAWELTNHVHYEGLAIVWVCPQEQAELYHEQLLRAGLTMAQLEPEGS

SEQ ID NO: 2078 - protein, 30 aa, Thermosynechococcus elongatus
ARVVPQERQQVPRKHYTNYKEIVMNYDFNT

SEQ ID NO: 2079 - protein, 15 aa, Thermosynechococcus elongatus
ARVVPQERQQVTRKH

SEQ ID NO: 2080 - protein, 81 aa, Thermosynechococcus elongatus
ARVVPQERQQVTRKHYPNYKVIVLNDDFNTYRHVAACLMKYIPNMTSDRAWELTNQVLFEGEAIVWVGPQEQAELYHEQLL

SEQ ID NO: 2081 - protein, 95 aa, Thermosynechococcus elongatus
ARVVPQERQQVTRKHYPNYKVIVLNDDFNTFQHVVACLKKYIPNMISDRAWELTNQVHYGCRAIVWVGPQEQAELYHEQLLRAGLTMAPLEPEGS

SEQ ID NO: 2082 - protein, 95 aa, Thermosynechococcus elongatus
ARVVPQERQQVTRKHYPNYKVIVLNDDFNTFRHVAACLKKYIPNMISDRAWELTNQVHYGGRAIVWVGPQEQAELYHEQLLRAGLTMAPLEPEGS

SEQ ID NO: 2083 - protein, 95 aa, Thermosynechococcus elongatus
ARVVPQERQQVTRKHYPNYKVIVLNDDFNTFRHVAACLMKYIPNMTSDRAWELTNQVHYEGQAIVWVGPQEQAELYHEQLLRAGLTMAPLEPEGS

SEQ ID NO: 2084 - protein, 95 aa, Thermosynechococcus elongatus
ARVVPQERQQVTRKHYPNYKVIVLNDDFNTFRHVAACLMKYIPNMTSDRAWELTNQVHYEGQAIVWVGPQEQAELYHEQLLRAGLTMAPLEPGGS

SEQ ID NO: 2085 - protein, 95 aa, Thermosynechococcus elongatus
ARVVPQERQQVARKHYPNYKVIVLNDDFNTFRHVAACLMKYIPNMTSDRAWELTNQVHYEGQAIVWVGPQVQAELYHEQLLRAGLTMAPLEPEGS

SEQ ID NO: 2086 - protein, 59 aa, Thermosynechococcus elongatus
ARVVPQEGQQVTRKHYPNYKVIVLNDDFNTIQHVVACLKKYIPNMISDRAWELTNQGHY

SEQ ID NO: 2087 - protein, 95 aa, Thermosynechococcus elongatus
ARVVPQEGQQVTRKHYPNYKVIVLNDDFNTYQHVVACLKKYIPNMISDRAWELTNQVHYGGRAIVWVGPQEQAELYHEQLLRAGLTMAPLEPEGS

SEQ ID NO: 2088 - protein, 81 aa, Thermosynechococcus elongatus
ARVVPQEGQQVTRKHYPNYKVIVLNDDFNTYQHVVACLKKYIPNMISDRAWELTNHVHYGGRAFVWVGPQEKAEFYLEQLL

SEQ ID NO: 2089 - protein, 95 aa, Thermosynechococcus elongatus
ARVVPQEGQQVTRKHYPNYKVIVLNDDFNTFQHDVACLKKYIPNMISDRAWELTNQVHYGGRAIVWVGPQEQAELYHEQLLRAGLTMAPLEPEGS

SEQ ID NO: 2090 - protein, 95 aa, Thermosynechococcus elongatus
ARVVPQEGQQVTRKHYPNYKVIVLNDDFNTFQHVVAGLKKYIPNMISDRAWELTNQVHYGGRAIVWVGPQEQAELYHEQLWRAGLTMAPLEPEGS

SEQ ID NO: 2091 - protein, 95 aa, Thermosynechococcus elongatus
ARVVPQEGQQVTRKHYPNYKVIVLNDDFNTFQHVVACLKKYIQNMISDRAWELTNKVHYGGRAIVWVGPQEQAELYHEQLLRAGLTMAPLEPEGS

SEQ ID NO: 2092 - protein, 95 aa, Thermosynechococcus elongatus; identical to SEQ ID NO: 442

SEQ ID NO: 2093 - protein, 95 aa, Thermosynechococcus elongatus
ARVVPQEGQQVTRKHYPNYKVIVLNDDFNTFQHVVACLKKYIPNMISDRAWELTNQVHYGGRAIVWVGPQEQAELYHEHLLRAGLTMAPLEPEGS

SEQ ID NO: 2094 - protein, 59 aa, Thermosynechococcus elongatus
ARVVPQEGQQVTRKHYPNYKVIVLNDDFNTFQHVVACLKKYIPNMISDRAWELTNQVHY

SEQ ID NO: 2095 - protein, 59 aa, Thermosynechococcus elongatus
ARVVPQEGQQVTRKHYPNYKVIVLNDDFNTFQHVVACLKKYIPNMISDRAWELTNHFHY

SEQ ID NO: 2096 - protein, 95 aa, Thermosynechococcus elongatus
ARVVPQEGQQVTRKHYPNYKVIVLNDDFNTFRHVAACLMKYIPNMTSDRAWELTNQVHYKGQAIVWVGPQEQAELYHEQLLRAGLTMAPLEPEGS

SEQ ID NO: 2097 - protein, 95 aa, Thermosynechococcus elongatus
ARVVPQEGQQVTRKHYPNYKFIVLNDDFNTFQHFVACLKKYITNMISDRAWELTNQVHYGGRAIVLFGPQEQAELYNEQLLRAGLTMAPLEPEGS

SEQ ID NO: 2098 - protein, 95 aa, Thermosynechococcus elongatus
ARVVPQEGQQYTRKHYPNYKVIVLNDDINTFKHVVARLKKYIPNMISDRAWELTNQVLYGGRAIVWVGPQEQSELYHEHLLRAGLTIDPLEPEGS

SEQ ID NO: 2099 - protein, 95 aa, Thermosynechococcus elongatus
ARVVPQEGQQLTRKHYPNYKVIVLNDDFNTFRHVAACLMKYIPNMTSDRAWELTNQVHYKGQAIVWVGPQEQAELNHEQLLRAGLTMAPLEPEGS

SEQ ID NO: 2100 - protein, 95 aa, Thermosynechococcus elongatus
ARVVPQEGQQFTRKHYPNYKVIFLNDDFNTFKHVVACLKKYIPNMISDRAWELTNQVHYGGRAIVWVGPQEQAELYHEQLLRAGLTMAPLEPEGS

SEQ ID NO: 2101 - protein, 81 aa, Thermosynechococcus elongatus
ARVVPQERQQDTRKHYPNYKGIVLNDDFNTFRHDAACLMKNIPNMTSDRAWELTNQGDFVGLAIVWVGPQEQAEFYPEQLW

SEQ ID NO: 2102 - protein, 81 aa, Thermosynechococcus elongatus
ARVVPQEGQQVTRKHYPNYKVIVLNDDFNTFQHVVACLKKYIPNMTSDRAWELTNHFHYIGLAFVWVGPQDQAEFNLEQLL

SEQ ID NO: 2103 - protein, 95 aa, Thermosynechococcus elongatus
ARVVAQERQQDTRKHYPNYKVIVLFDDFNTFRHVAACLMKYIPNMTSDRACELTNQVHYEGQAIVWVGPQEQAELYHEQFLTAGLTMAPLEPEGS

SEQ ID NO: 2104 - protein, 95 aa, Thermosynechococcus elongatus
ASIVPQERQQVARKHYPNYKVIVLNDDFNTFRHVAACLMKYIPNMTSDRAWELTNQVHYEGQAIVWVGPQVQAELYHEQLLRAGLTMAPLEPEGS

SEQ ID NO: 2105 - protein, 95 aa, Thermosynechococcus elongatus
ASIVPQERQQVARKHYPNYKVIVLNDDFNTFRHVAACLMKYIPNMTSDRAWELTNQVHNEGQAIVWVGPQVQAELYHEQLLRAGLTMAPLEPGGS

SEQ ID NO: 2106 - protein, 95 aa, Thermosynechococcus elongatus
ASIVPQERQQDTRKHYPNYKVIVLNDDFNTFRHVAACLMKYIPNKTSDRAWELTNQVHYEGQAIVWVGPQEQAELYHEQLLRAGLTMAPLEPEGS

SEQ ID NO: 2107 - protein, 95 aa, Thermosynechococcus elongatus
ASIVPQEGQQVTRKHYPNYKVIVLNDDFNTFQHVVACLKKYIPNMISDRAWELTNQVHYGGRAIVWVGPQEQAELYHEQLLRAGLTMAPLEPEGS

SEQ ID NO: 2108 - protein, 95 aa, Thermosynechococcus elongatus
ASLVPQERQQVARKHYPNYKVIVLNDDFNTFRHVAACLMKYIPNMTSDRAWELTNQVHYEGQAIVWVGPQEQAELYLEQLLRAGLTMAPLEPEGS

SEQ ID NO: 2109 - protein, 95 aa, Thermosynechococcus elongatus
ASLVPQEGQQVTRKHYPNYKVIVLNDDFNTFQHVVACLKKYIPNMISDRAWELTNQVHYGGRAIVWVGPQEQAELYHEQLLRAGLTMAPLEPEGS

SEQ ID NO: 2110 - protein, 95 aa, Thermosynechococcus elongatus
ASDVPQERQQVARKHYPNYKVIVLNDDFNTFRHVAACLMKYIPNMTSDRAWELTNQVHYEGQAIVWVGPQVQAELYHEQLLRAGLTMAPLEPGGS

SEQ ID NO: 2111 - protein, 95 aa, Thermosynechococcus elongatus
ASDVPQERQQDTRKHYPNYKVIVLNDDFNTYRHVAACLMKYIPNKTSDRACELTNQVHYEGQAIVWVGPQVQAELYHEQLLRAGLTMAPLEPGGS

SEQ ID NO: 2112 - protein, 95 aa, Thermosynechococcus elongatus
ASDVPQERQQDTRKHYPNYKVIVLNDDFNTFRHVAACLMKYIPNKTSDRAWELTNQVHYEGQAIGWVGPQDQAELSHEPLLRAGLTMAPMEPGGS

SEQ ID NO: 2113 - protein, 95 aa, Thermosynechococcus elongatus
ASDVPQERQQDTRKHYPNYKVIVLNDDFNTFRHVAACLMKYIPNKTSDRAWELTNQVHYEGQAIVWVGPQEQAELYHEQLLRACLTMAPLEPEGS

SEQ ID NO: 2114 - protein, 44 aa, Thermosynechococcus elongatus
ASDVPQERQQDTRKHYPNYKVIVLNDDFNTFRHVAACLMKYIPN

SEQ ID NO: 2115 - protein, 95 aa, Thermosynechococcus elongatus
ASDVPQERQQVTRKHYPNYKVIVLNDDFNTFRHVAACLMKYIPNMTSDRAWELTNQVLFGGRAIVWVGPQEQAELYHVQLLRAGLTLAPLVPEGS

SEQ ID NO: 2116 - protein, 81 aa, Thermosynechococcus elongatus
ASDVPQERQQVTIKHYPNNKDIVMNDYYNTIKHVVACLKKYIPNMISHRAWELTNQVLYGGRAIVWVGPQEQAELYLEQLF

SEQ ID NO: 2117 - protein, 95 aa, Thermosynechococcus elongatus
ASDVPQERQQVTRKHYPNYKVIVLNDDFNTFRHVAACLMKYIPNMTSDRAWELTNQVHYKGQAIVWVGPQEQAELNHEQLLRAGLTMAALEPEGS

SEQ ID NO: 2118 - protein, 95 aa, Thermosynechococcus elongatus
ASDVPQEGQQVTRKHYPNYKVIVLNDDFNTIQHVVACLKKYIPNMISDRAWELTNHVLYGGRGIVLVGPQEQAEFYHEQLLRAGLSRAPLVPDGS

SEQ ID NO: 2119 - protein, 95 aa, Thermosynechococcus elongatus
ASDVPQEGQQVTRKHYPNYKVIVLNDDFNTFQHVAACLMKYIPNMTSDRAWELTNQVHYVGQAIVWVGPQEQAELYHEQLLRAGLTMAPLEPKGS

SEQ ID NO: 2120 - protein, 95 aa, Thermosynechococcus elongatus
ASDVPQEGQQVPRKHYPNYKVIVLNDDFNTFQHVVACLKKYIPNMISDRAWELTNQVLFEGQAIVRVGPQEQAELYHKQLVRAGLTMAPLEPEGS

SEQ ID NO: 2121 - protein, 95 aa, Thermosynechococcus elongatus
ASAVPQERQQVARKHYPNYKVIVLNDDFNTFRHVAACLMKYIPNKTSDRAWELTNQVHYEGQAIVWVGPQEQAELYHEQLLRAGLTMAPLEPEGS

SEQ ID NO: 2122 - protein, 95 aa, Thermosynechococcus elongatus
ASAVPQERQQVARKHYPNYKVIVLNDDFNTFRHVAACLMKYIPNMTSDRAWELTNQVHYEGQAIVWVGPQEQAELYHEQLLRAGLTMAPLEPEGS

SEQ ID NO: 2123 - protein, 95 aa, Thermosynechococcus elongatus
ASAVPQERQQVARKHYPNYKVIVLNDDFNTFRHVAACLMKYIPNMTSDRAWELTNQVHYEGQAIVWVGPQVQAELYHEQLLRAGLTMAPLEPGGS

SEQ ID NO: 2124 - protein, 95 aa, Thermosynechococcus elongatus
ASAVPQERQQVTRKHYPNYKVIVLNDDFNTFRHVAACLMKYIPNMTSDRAWELTNQVHYEGQAIVWVGPQEQAELYHEQLLRAGLTMASLEPEGS

SEQ ID NO: 2125 - protein, 95 aa, Thermosynechococcus elongatus
ASAVPQERQQVTRKHYPNYKVIVLNDDFNTFRHVAACLMKYIPNMTSDRAWELTNQVHYKGQAIVWVGPQEQAELNHEQLLRAGLTMAPLEPEGS

SEQ ID NO: 2126 - protein, 95 aa, Thermosynechococcus elongatus
ASGVPQERQQVARKHYPNYKVIVLNDDFNTFRHVAACLKKYIPNMISDRAWELTNQVHYGGRAIVWVGPQEQAELYHEQLLRAGLTMAPLEPEGS

SEQ ID NO: 2127 - protein, 95 aa, Thermosynechococcus elongatus
ASGVPQERQQVARKHYPNYKVIVLNDDFNTFRHVAACLMKYIPNMTSDRAWELTNQVHYEGQAIVWVGPQVQAELYHEQLLRAGLTMAPLEPGGS

SEQ ID NO: 2128 - protein, 95 aa, Thermosynechococcus elongatus
ASGVPQERQQDTRKHYPNYKVIVLNDDFNTFRHVAACLMKYIPNMTSDRAWELTNQVHYEGQAIVWVGPQEQAELYHEQLLRAGLTMAPLEPEGS

SEQ ID NO: 2129 - protein, 95 aa, Thermosynechococcus elongatus
ASGVPQERQQVARKHYPNYNVIVLKDEFNTFRHVAACLMKYIPNMTSDRAWELTNQVHYEGQAIVWVGPQVQAELYHEQLLRAGLTMAPLEPGGS

SEQ ID NO: 2130 - protein, 95 aa, Thermosynechococcus elongatus
ASGVPQERQHVTRKHYPNYKGIVLNDDFNTFRPVAACLMTYIPNMTSDRAWELTNQVHYNGQAIVWVGPQEQAELNHEQLLRAGLTMATRDPEGS

SEQ ID NO: 2131 - protein, 95 aa, Thermosynechococcus elongatus
ASGVPQEGQQVTRMHYPNYKVLVLNDDCNSFQHVVACLKKDSPTMISDRAWDLTNQVHYGGRAIVWVGPHAHAELDHEPLLRAGLTMAPLEPEGS

SEQ ID NO: 2132 - protein, 79 aa, Thermosynechococcus elongatus
ASGVPQERQHDTRKHYPNYKVIVLNDDFNTFRHVAACLMKNIPNMTSDRAWELTNQVHYDGQAIVWVAPQAQAELYHEQ

SEQ ID NO: 2133 - protein, 95 aa, Thermosynechococcus elongatus
ASVEPQERQQVTRKHYPNYKVIVLNDDFNTFRHDAACLMKYIPNKTSDRAWELTNQVHYEGQAIVWVGPHEQAELYHEHLLRAGLTMAPLEPEGS

SEQ ID NO: 2134 - protein, 95 aa, Thermosynechococcus elongatus
ASVVQQEGQQVTRKHYPNNKFLVLNDDFNTFKHVVESLKKYIPNMISDRAWELTNQVHYGGRAIVWVGPQEQAELYHEQLLRAGLTMAPLEPGGS

SEQ ID NO: 2135 - protein, 95 aa, Thermosynechococcus elongatus; identical to SEQ ID NO: 6

SEQ ID NO: 2136 - protein, 75 aa, Thermosynechococcus elongatus
ASVVPQERQQFARKHYPNYKVIVLNDDFNTFRHYAACLMKNIPNMTSDRAWELTNQVHFEGLAIVWVGPQVQAEF

SEQ ID NO: 2137 - protein, 70 aa, Thermosynechococcus elongatus
ASVVPQERQQDTRKHYPNYKVIVLNDDFNTFRHFAASLMKYIPNMTSDRAWELTNQVHYEGQAIVWVGPQ

SEQ ID NO: 2138 - protein, 95 aa, Thermosynechococcus elongatus
ASVVPQERQQDTRKHYPNYKVIVLNDDFNTIRHVAACLMKYIPNKTSDRAWELTNQVHYEGQAIVCVGTQEQAELYHEQLLRAGLTMSPFEQEGS

SEQ ID NO: 2139 - protein, 95 aa, Thermosynechococcus elongatus; identical to SEQ ID NO: 4

SEQ ID NO: 2140 - protein, 95 aa, Thermosynechococcus elongatus
ASVVPQERQQDTRKHYPNYKVIVLNDDFNTFRHVAACLMKYIPNMTSDRAWELTNQVHYEGQAIVWVGPQVQAELYHEQLLRAGLTMATLEPEGS

SEQ ID NO: 2141 - protein, 95 aa, Thermosynechococcus elongatus; identical to SEQ ID NO: 33

SEQ ID NO: 2142 - protein, 36 aa, Thermosynechococcus elongatus
ASVVPQERQQVTRKHNPNYKFIVLNYDFNTLRHIAA

SEQ ID NO: 2143 - protein, 95 aa, Thermosynechococcus elongatus; identical to SEQ ID NO: 10

SEQ ID NO: 2144 - protein, 95 aa, Thermosynechococcus elongatus; identical to SEQ ID NO: 91

SEQ ID NO: 2145 - protein, 95 aa, Thermosynechococcus elongatus; identical to SEQ ID NO: 5

SEQ ID NO: 2146 - protein, 95 aa, Thermosynechococcus elongatus
ASVVPQERQQVARKHYPNSKVIDLNDDFNTYQHDAACLMKYIPNMTSDRAWELTNQVHFLGQAIVWVGPQVQAELYLEQLLRAGLTMAQLEPGGS

SEQ ID NO: 2147 - protein, 95 aa, Thermosynechococcus elongatus
ASVVPQEGQQDTRKHYPNYKDIVLNDDFNTFQHVVACLKKYIPNMISDRAWELTNQVHYGGRAIVWVGPQEQAELYHEQLLRAGLTRAPLEPEGS

SEQ ID NO: 2148 - protein, 95 aa, Thermosynechococcus elongatus; identical to SEQ ID NO: 30

SEQ ID NO: 2149 - protein, 95 aa, Thermosynechococcus elongatus
ASVVPQERQQVARKHYPNYKVIVLNDDFNTFRHVAACLMKYIPNMTSDRAWELTNQVHYEGQAIVWVGPQVQAELYHEQLLRAGLIMAPLEPGGS

SEQ ID NO: 2150 - protein, 95 aa, Thermosynechococcus elongatus; identical to SEQ ID NO: 38

SEQ ID NO: 2151 - protein, 95 aa, Thermosynechococcus elongatus; identical to SEQ ID NO: 100

SEQ ID NO: 2152 - protein, 95 aa, Thermosynechococcus elongatus; identical to SEQ ID NO: 1434

SEQ ID NO: 2153 - protein, 95 aa, Thermosynechococcus elongatus; identical to SEQ ID NO: 12

SEQ ID NO: 2154 - protein, 95 aa, Thermosynechococcus elongatus; identical to SEQ ID NO: 64

SEQ ID NO: 2155 - protein, 95 aa, Thermosynechococcus elongatus; identical to SEQ ID NO: 2

SEQ ID NO: 2156 - protein, 95 aa, Thermosynechococcus elongatus; identical to SEQ ID NO: 5

SEQ ID NO: 2157 - protein, 95 aa, Thermosynechococcus elongatus; identical to SEQ ID NO: 22

SEQ ID NO: 2158 - protein, 95 aa, Thermosynechococcus elongatus; identical to SEQ ID NO: 2

SEQ ID NO: 2159 - protein, 95 aa, Thermosynechococcus elongatus
ASVVPQERQQVTRKHYPNYKVIVLNDDFNTFRHVAACLMKYIPNKTSDRAWELTNQVHYVGQAIVWVGPQERAELYHEQLLRAGLTRAPLEPEGS

SEQ ID NO: 2160 - protein, 95 aa, Thermosynechococcus elongatus
ASVVPQEGQQVTRKYYPNYKVIVLNDDFNTFRHVAACLMKYIPNKTSDRAWELTNQVHYEGQAIVWVGPQEQAELYHEQLLRAGLTMAPLEPEGS

SEQ ID NO: 2161 - protein, 95 aa, Thermosynechococcus elongatus
ASVVPHERQQDTRKHYPNYKGIVLNDDFNTFRHVAACLMKYIPNMTSDRAWELTNQVHYEGQAIVWVGPQEQAELYHEQLLRAGLTMAPLETEGS

SEQ ID NO: 2162 - protein, 95 aa, Thermosynechococcus elongatus
ASVVPQERQQDTRKHYPNYKVIVLNDDFNTFRHVAACLMKYIPNKTSDRAWELTNQVHYEGQAIVWVGPQEQAELDHEQLLRAGLTMAPLEPEGS

SEQ ID NO: 2163 - protein, 95 aa, Thermosynechococcus elongatus
ASVIPQERQQDTRKHYPNYKVIVLNDDFNTFRHVAACLMKYIPNMTSDRAWELTNQVHYKGQAIVWVGPQEQAELNHEQLLRAGLTMAPLEPEGS

SEQ ID NO: 2164 - protein, 95 aa, Thermosynechococcus elongatus
ASVIPQERQQVTRKHYPNYKVIVLNDDFNTFQHVAACLMKYIPNMTSDRAWELTNQVHYEGQAIVWVGPREQAELYHEQLLRVGLTMAPLEPEGS

SEQ ID NO: 2165 - protein, 95 aa, Thermosynechococcus elongatus; identical to SEQ ID NO: 645

SEQ ID NO: 2166 - protein, 95 aa, Thermosynechococcus elongatus
ASVIPQERQQVTRKHYPNYKVIVLNDDFNTFQHVVACLKKYIPNMISDRAWELTNQVHYGGRAIVWVGPQEQAELYHEQLLRAGLTMAPLEPEGS

SEQ ID NO: 2167 - protein, 95 aa, Thermosynechococcus elongatus
ASVIPQEGQQVTRKHYPNYKVIVLNDDFNTFQHVVACLKKYIPNMISDRAWELTNQVHYGGRAIVWVGPQEQAELYHEQLLRAGLTMAPLEPEGS

SEQ ID NO: 2168 - protein, 95 aa, Thermosynechococcus elongatus
ASVIPQEGQQVTRKHYPNYKVIVLNDDFNTFQHVVACLKKYIPNMISDRAWELTNQVHYGGRAIVWVGPQEQAELYHEQLLRAGLTMAPLEPGGS

SEQ ID NO: 2169 - protein, 95 aa, Thermosynechococcus elongatus
ASVIPQEGQQVTRKHYPNYKVIVLNDDFNTFRHVAACLMKYIPNMTSDRAWELTNQVHYEGQAIVWVGPQEQAELYHEQLLRAGLTMAPLEPEGS

SEQ ID NO: 2170 - protein, 95 aa, Thermosynechococcus elongatus
ASVIPQERQQVARKHYPNYKVIVLNDDFNTFRHVAACLMKNIPNRTSDRARELTNQVHDEGQAIDWVGPQVQAEVYHEQLLRAGLTMAPLEPGGS

SEQ ID NO: 2171 - protein, 23 aa, Thermosynechococcus elongatus
ASVLPQERQQDTRKHNTNYKVIV

SEQ ID NO: 2172 - protein, 95 aa, Thermosynechococcus elongatus; identical to SEQ ID NO: 2057

SEQ ID NO: 2173 - protein, 95 aa, Thermosynechococcus elongatus
ASVLPQERQQVTRKHHPNYKVIVLNDDFNTFRHVAACLMKYIPNMTSDRAWELTNQVHYEGQAIVWVGPQEQAELYHEQLLRAGLTMAPLEPEGS

SEQ ID NO: 2174 - protein, 77 aa, Thermosynechococcus elongatus
ASVETQERQQDARKNYPNYKDIYLNDDYNTIRHVAACLMNYITNMTSDRAWELTNQVHYKGQAIVWVCPQEQAELYH

SEQ ID NO: 2175 - protein, 95 aa, Thermosynechococcus elongatus
ASVEPKEGQQVTRKHYPNYKVIVLNDDFNTFQHVVACLKKYIPNMISDRAWELTNQVHYGGRAIVWVGPQEQAELYHEQLLRAGLTMAQLEPEGS

SEQ ID NO: 2176 - protein, 95 aa, Thermosynechococcus elongatus
ASVEPQERQQVARKHYPNYKDIDLNDDYNTFRHVAACLMKYIPNMTSDRAWELTNQVHYEGLAIVWVGPQEQAELFHEQLLRAGLTMATLERVGS

SEQ ID NO: 2177 - protein, 95 aa, Thermosynechococcus elongatus
ASVEPQERQQVARKHYPNYKVIVLNDDFNTFRHVAACLMKYIPNMTSDRAWELTNQVHYEGQAIVWVGPQVQAELYHEQLLRAGLTMAPLEPGGS

SEQ ID NO: 2178 - protein, 95 aa, Thermosynechococcus elongatus
ASVEPQERQQVARKHYPNYKVIVLNDDFYTFRHVAACLMKYSPNMTSDRAWELTNQVHYEGQAIVWVGPQEQAELYHEQLLRTGLTMAPLEPEGS

SEQ ID NO: 2179 - protein, 95 aa, Thermosynechococcus elongatus
ASVEPQERQQDTRKQYTNYKVIDLNDDFNTFQHVVACLKKYIPNMISDRAWELTNQVHYGGRAIVWVGPQEQAELYHEQLLRAGLTMATLDPEGS

SEQ ID NO: 2180 - protein, 95 aa, Thermosynechococcus elongatus
ASVEPQERQQDTRKHYPNYKDIVLNDDFNTFRHVAACLMKYIPNMTSDRAWELTNQVHYEGQAIVWFGPQEQAELYHEKLLRAGLTIAPLEPEGS

SEQ ID NO: 2181 - protein, 95 aa, Thermosynechococcus elongatus
ASVEPQERQQDTRKHYPNYKDIVLNDDFNTFLHEAACLMKYIPNMTSDRAWELTNQVHYVGLAIVRVVPQVQAELYHILLLRAGLTMAPLEPEGS

SEQ ID NO: 2182 - protein, 95 aa, Thermosynechococcus elongatus
ASVEPQERQQDTRKHYPNYKGIVLNDDFNTFRHVAACLMKYIPNMTSDRAWELTNQVHYEGQAIVWVGPQEQAELYHEQLLRAGLTMAPLEPEGS

SEQ ID NO: 2183 - protein, 95 aa, Thermosynechococcus elongatus
ASVEPQERQQDTRKHYPNYKVIVLNDDFNTFRHVAACLMKYIPNKTSDRAWELTNQVHYEGQAIVWVGPQEQAELYHEQLLRAGLTMAPLEPEGS

SEQ ID NO: 2184 - protein, 95 aa, Thermosynechococcus elongatus
ASVEPQERQQDTRKHYPNYKVIVLNDDFNTFRHVAACLMKYIPNMTSDRAWELTNQVHYEGQAIVWVGPQEQAELYHEQLLRAGLTMAPLEPEGS

SEQ ID NO: 2185 - protein, 95 aa, Thermosynechococcus elongatus
ASVEPQERQQDTRKHYPNYKVIVLNDDFNTFRHVAACLMKYIPNMTSDRAWELTNQVHYEGQAIVWVGPQEQAELYHEQLLRAGLTMAPLEPGGS

SEQ ID NO: 2186 - protein, 95 aa, Thermosynechococcus elongatus
ASVEPQEGQQVTRKHYPNYKVIVLNDDFNTFQHVVACLKKYIPNMISDRAWELTNQVHYGGRAIVWVGPQEQAELYHEQLLRAGLTMAPLEPEGS

SEQ ID NO: 2187 - protein, 95 aa, Thermosynechococcus elongatus; identical to SEQ ID NO: 2186

SEQ ID NO: 2188 - protein, 95 aa, Thermosynechococcus elongatus
ASVAPQERQQVARKHYPNYKVIVLNDDFNTFQHVVACLKKYIPNMISDRAWELTNQVHYGGRAIVWVGPQEQAELYHEQLLRAGLTMAPLEPEGS

SEQ ID NO: 2189 - protein, 95 aa, Thermosynechococcus elongatus
ASVAPQERQQVARKHYPNYKVIVLNDDFNTFRHVAACLMKYIPNKTSDRAWELTNQVHYEGQAIVWVGPQEQAELYHEQLLRAGLTMAPLEPEGS

SEQ ID NO: 2190 - protein, 95 aa, Thermosynechococcus elongatus
ASVAPQERQQDTRKHYPNYKVIILNDDFNTFQHVAACLMKYIPNMTSDRAWELTNQVHYEGQAIVRVGPQEQAELYHKQLLRAGLTMAPLEPEGS

SEQ ID NO: 2191 - protein, 95 aa, Thermosynechococcus elongatus
ASVAPQERQQDTRKHYPNYKVIVLNDDFNTFRHVAACLMKYIPNKTSDRAWELTNQVHYEGQAIVWVGPQEQAELYHEQLLRAGLTMAPLEPEGS

SEQ ID NO: 2192 - protein, 95 aa, Thermosynechococcus elongatus
ASVAPQERQQDTRKHYPNYKVIVLNDDFNTFRHVAACLMKYIPNKTSDRAWELTNQVHYEGQAIVWVGPQEQAELYHEQLLRAGLTMAPLEPGGS

SEQ ID NO: 2193 - protein, 95 aa, Thermosynechococcus elongatus; identical to SEQ ID NO: 1211

SEQ ID NO: 2194 - protein, 95 aa, Thermosynechococcus elongatus
ASVAPQERQQDTRKHYPNYKVIVLNDDFNTFRHVAACLMKYIPNMTSDRAWELTNQVLYEGQAIVWVGPQEQAELYHEQVLRAGLTMAPLEPEGS

SEQ ID NO: 2195 - protein, 95 aa, Thermosynechococcus elongatus
ASVAPQERQQDTRKRYPNYKVIGLNDDFNTFRHVAACLMKYIPNMTSDRAWELTNQVHYEGQAIVWVGPQEQAELYHEQLLRAGLTMAPLEPEGS

SEQ ID NO: 2196 - protein, 95 aa, Thermosynechococcus elongatus
ASVAPQEGQQVTRKHYPNYKVIVLNDDFNTFQHVVACLKKYIPNMISDRAWELTNQVHYGGRAIVWVGPQEQAELYHEQLLRAGLTMAPLEPEGS

SEQ ID NO: 2197 - protein, 95 aa, Thermosynechococcus elongatus; identical to SEQ ID NO: 2196

SEQ ID NO: 2198 - protein, 95 aa, Thermosynechococcus elongatus
ASVAPQEGQQVTRKHYPNYKVIVLNDDFNTFQHVVACLKKYIPNMISDRAWELTNQVHYGGRAIVWVGPQEQAELYHEQLLRAGLTMAPLEPGGS

SEQ ID NO: 2199 - protein, 95 aa, Thermosynechococcus elongatus
ASVAPQEGQQVTRKHYPNYKVIVLNDDFNTFQHVVACLKKYIPNMISDRAWELTNQVHYGGRAIVWVGPQEQAELYHEQFLRAGLTMAPLEPDGS

SEQ ID NO: 2200 - protein, 95 aa, Thermosynechococcus elongatus
ASVAPQEGQQVTRKHYPNYKVIVLNDDFNTFRHVAACLMKYIPNMTSDRAWELTNQVHYEGQAIVWVGPQEQAELYHEQLLRAGLTMAPLEPEGS

SEQ ID NO: 2201 - protein, 95 aa, Thermosynechococcus elongatus
ASVGPQERQHVTRKHDPNYKVLVVNDDFHTFRHVAACLMKYIPNMTSDRAWELTNQVHDKGQAIVWVGPQEQAELNHEQLLRAGLTMAPLEPEGS

SEQ ID NO: 2202 - protein, 95 aa, Thermosynechococcus elongatus
ASVGPQEGQQGTRKHYPNYKGLVLNDDFNTFRHVAACLMKYIPNMTSDRAWELTNQVHYEGQAIVWVGPQVQAVLYPEQLLRAGLPMAPLEPGGS

SEQ ID NO: 2203 - protein, 95 aa, Thermosynechococcus elongatus
ASVGPQEGQQVTRKHYPNYKVIVLNDDFNTFQHVVACLKKYIPNMISDRAWELTNQVHYGGRAIVWVGPQEQAELYHEQLLRAGLTMAPLEPEGS

SEQ ID NO: 2204 - protein, 21 aa, Thermosynechococcus elongatus
ASVVHKKDSKILESTTQTTRL

SEQ ID NO: 2205 - protein, 95 aa, Thermosynechococcus elongatus
ASVVKQEGQQVSRNHYPKYNVIFFNVDFKTFRHVAACLMKYIPNMTSDRAWELTNQVHYKGQAIVWVGPQEQAELNHEQLLRAGLTMAPLEPEGS

SEQ ID NO: 2206 - protein, 95 aa, Thermosynechococcus elongatus
ASVVTQERQQVARKHYPNYKVIVLNDDFNTFRHVAACLMKYIPNMTSDRAWELTNQVHYEGQAIVWVGPQVQAELYHEQLLRAGLTMAPLEPGGS

SEQ ID NO: 2207 - protein, 95 aa, Thermosynechococcus elongatus
ASVVTQERQKVTRKHYPNYKVIVLNDDFNTFRHVAACLMKYIPNMTSDRAWELTNQVHYEGQAIVWVGPQEQAELYHEQLLRAGLTMAPLEPEGS

SEQ ID NO: 2208 - protein, 58 aa, Thermosynechococcus elongatus
ASVVTQERQQDTRKNYPNYKVIVLNDDFYTFRHVDECLMKYIQNMTSHRALELTNQLL

SEQ ID NO: 2209 - protein, 95 aa, Thermosynechococcus elongatus
ASVVTQERQQDTRKHYPNYKVIVLNDDINTFRHDAACLMKYIPNMTSDRAWELTNLVHYEGQAIVWVGPQEQAELYHEQLLRAGLTMAPLEPEGS

SEQ ID NO: 2210 - protein, 58 aa, Thermosynechococcus elongatus
ASVVTQERQQDTRKHYPNYKVIVLNDDFNTFRHVAECLMKYIPNMTSDRAWELTNQAH

SEQ ID NO: 2211 - protein, 95 aa, Thermosynechococcus elongatus
ASVVTQERQQDTRKHYPNYKVIVLNDDFNTFRHDAACLMKYIPNMTSDRAWELTNQVHYEGQAIVWVGPQEQAELYHEQLLRAGLTMAPLEPEGS

SEQ ID NO: 2212 - protein, 95 aa, Thermosynechococcus elongatus
ASVVTQERQQDTRKHYPNYKVIVLNDDFNTFRHVAACLMKYIPNMTSDRAWELTNKVHYEGQAIVWVGPQEQAELYHEQLLRAGLTMAPLEPEGS

SEQ ID NO: 2213 - protein, 95 aa, Thermosynechococcus elongatus
ASVVTQERQQDTRKHYPNYKVIVLNDDFNTFRHVAACLMKYIPNMTSDRAWELTNQVHYGGRAIVWVGPQEQAELYHEQLLRAGLTMAPLEPEGS

SEQ ID NO: 2214 - protein, 95 aa, Thermosynechococcus elongatus
ASVVTQERQQDTRKHYPNYKVIVLNDDFNTFRHVAACLMKYIPNMTSDRAWELTNRVHYEGQAIVWVGPQEQAELYHEQLLRAGLTIAPFEPEGS

SEQ ID NO: 2215 - protein, 36 aa, Thermosynechococcus elongatus
ASVVTQERQQYTRKNYTNYKVIVLNYDFNTFIHVDE

SEQ ID NO: 2216 - protein, 95 aa, Thermosynechococcus elongatus
ASVVTQEGQQVTRKHYPNYKDIVLNDDFNTYQHVVACLKKYIPNMISDRAWELTNQVHYGGRAIVWVGPQEQAELFHEQLLRAGLTLAPLVPEGS

SEQ ID NO: 2217 - protein, 23 aa, Thermosynechococcus elongatus
ASVVTQEGQQVTRKHYPNYKVIV

SEQ ID NO: 2218 - protein, 95 aa, Thermosynechococcus elongatus
ASVVTQEGQQVTRKHYPNYKVIVLNDDFNTFQHVVACLKKYIPNMISDRAWELTNQVHYEGQAIVWVGPQEQAELYHEQLLRAGLTMAPLEPEGS

SEQ ID NO: 2219 - protein, 95 aa, Thermosynechococcus elongatus
ASVVTQEGQQVTRKHYPNYKVIVLNDDFNTFQHVVACLKKYIPNMISDRAWELTNQVHYGGRAIVWVGPQEQAELYHEQLLRAGLTMAPLEPEGS

SEQ ID NO: 2220 - protein, 95 aa, Thermosynechococcus elongatus
ASVVTQEGQQVTRKHYPNYKVIVLNDDFNTFQHVVACLKKYIPNMISDRAWELTNQVHYGGRAIVWVGPQEQAELYHEQLLRAGLTMAPLEPGGS

SEQ ID NO: 2221 - protein, 95 aa, Thermosynechococcus elongatus
ASVVTQEGQQVTRKHYPNYKVIVLNDDFNTFRHVAACLMKYIPNMTSDRAWELTNQVHYEGQAIVWVGPQEQAELYHEQLLRAGLTMAPLEPEGS

SEQ ID NO: 2222 - protein, 36 aa, Thermosynechococcus elongatus
ASVVTQEGQQVTRQHYTNYKFILLNDDFNTFQNVVE

SEQ ID NO: 2223 - protein, 6 aa, Thermosynechococcus elongatus
ASVVTQ

SEQ ID NO: 2224 - protein, 95 aa, Thermosynechococcus elongatus
ASVVQKEGQQVTRKHYPNYKVIVMNDDFKTFQHVVACLMKYIPNMTSDRACELTNQVHYKGQAIVWVGTPEQAELYHEQLLRAGLTMAPLDPEGS

SEQ ID NO: 2225 - protein, 95 aa, Thermosynechococcus elongatus; identical to SEQ ID NO: 850

SEQ ID NO: 2226 - protein, 95 aa, Thermosynechococcus elongatus
ASVVQQERQQVARKHYPNYKVIVLNDDFNTFRHVAACLMKYIPNMTSDRAWELTNQVHYGGRAIVWVGPQEQAELYHEQLLRAGLTMAPLEPEGS

SEQ ID NO: 2227 - protein, 95 aa, Thermosynechococcus elongatus
ASVVQQERQQVARKHYPNYKVIVLNDDFNTFRHFAACLMKYIPNMTSDRAWELTNQVHYEGQAIVWVGPQEQAELYHEQLLRAGLTMAPLETEGS

SEQ ID NO: 2228 - protein, 95 aa, Thermosynechococcus elongatus
ASVVQQERQQVSRKHYPNYKVIVLNDDINTFRHVAACLMKYIPNMTSDRAWELTNQVHYEGQAIVWVGPQVQAELYHEQLLRAGLTMAPLEPGGS

SEQ ID NO: 2229 - protein, 40 aa, Thermosynechococcus elongatus
ASVVQQERQQDTRKHYPNYKVIVLNDDFNTFRHVAACLMK

SEQ ID NO: 2230 - protein, 95 aa, Thermosynechococcus elongatus; identical to SEQ ID NO: 852

SEQ ID NO: 2231 - protein, 95 aa, Thermosynechococcus elongatus
ASVVQQERQQDTRKHYPNYKVIVLNDDFNTFRHVAACLMKYIPNKTSDRAWELTNQVHYVGQAIVWVGPQERAELYHEQLLRAGLTMAPLEPEGS

SEQ ID NO: 2232 - protein, 58 aa, Thermosynechococcus elongatus
ASVVQQERQQDTRKHYPNYKVIVLNDDFNTFRHVAACLMKYIPNMTSDRAWELTNKVH

SEQ ID NO: 2233 - protein, 95 aa, Thermosynechococcus elongatus; identical to SEQ ID NO: 443

SEQ ID NO: 2234 - protein, 95 aa, Thermosynechococcus elongatus
ASVVQQERQQDTRKHYPNYKVIVLNDDFNTFRHVAACLMKYIPNMTSDRAWELTNQVHYEGQAIVWVGPQEQAELNHEQLLRAGLTMAPLEPEGS

SEQ ID NO: 2235 - protein, 95 aa, Thermosynechococcus elongatus
ASVVQQERQQDTRKHYPNYKVIVLNDDFNTFRHVAACLMKYIPNMTSDRAWELTNQVHYEGQAIVWVGPQEQAELYHEQLLRAGLTMAPLESEGS

SEQ ID NO: 2236 - protein, 95 aa, Thermosynechococcus elongatus
ASVVQQERQQDTRKHYPNYKVIVLNDDFNTFRHVAACLMKYIPNMTSDRAWELTNQVHYEGQAIVWVGPQVQAELYHEQLLRAGLTMAPLEPEGS

SEQ ID NO: 2237 - protein, 95 aa, Thermosynechococcus elongatus
ASVVQQERQQDTRKHYPNYKVIVLNDDFNTFRHVAACLMKYIPNMTSDRAWELTNQVHYEGQAIVWVGPQVQAELYHEQLLRAGLTMAPLEPGGS

SEQ ID NO: 2238 - protein, 77 aa, Thermosynechococcus elongatus
ASVVQQERQQDTRKHYPNYKVIVLNDDFNTFRHVAACLMKYIPNMTSDRAWELTNQVLYEGQAIVWVGPQEQAELYH

SEQ ID NO: 2239 - protein, 95 aa, Thermosynechococcus elongatus
ASVVQQERQQDTRKHYPNYKVIVLNDDFNTFRHVAACLMKYIPNMTSDRAWELTNHVHYEGQAIVWVGPQEQAELYHEQLLRAGLTMAPLEPEGS

SEQ ID NO: 2240 - protein, 95 aa, Thermosynechococcus elongatus
ASVVQQERQQDTRKHYPNYKVIVLNDDFNTFRHVAACLMKYIPNMTSDRAWELTNQVHYKGQAIVWVGPQEQAELNHEQLLRAGLTMAPLEPEGS

SEQ ID NO: 2241 - protein, 95 aa, Thermosynechococcus elongatus
ASVVQQERQQVTRKHYPNYKVIVLNDDFNTFRHVDACLMKYIPNMTSDRAWELTNQVHYEGQAIVWVGPQEQAELNHEQLLRAGLTMAPLEPEGS

SEQ ID NO: 2242 - protein, 40 aa, Thermosynechococcus elongatus
ASVVQQERQQVTRKHHPNYKVIVLNDDFNTFRHVAACLMK

SEQ ID NO: 2243 - protein, 95 aa, Thermosynechococcus elongatus
ASVVQQERQQVTRKHHPNYKVIVLNDDFNTFRHVAACLMKYIPNMTSDRAWELTNQVHYEGQAIVWVGPQEQAELYHEQLLRAGLTMAPLEPEGS

SEQ ID NO: 2244 - protein, 95 aa, Thermosynechococcus elongatus
ASVVQQERQQVTRKHYPNYKVIVLNDDFNTFRHVAACLMKYIPNMTSDRAWELTNQVHYEGQAIVWVGPQVQAELYHEQLLRAGLTMAPLEPGGS

SEQ ID NO: 2245 - protein, 95 aa, Thermosynechococcus elongatus
ASVVQQERQQVTRKHYPNYKVIVLNDDFNTFRHVAACLMKYIPNMTSDRAWELTNQVHYGGRAIVWVGPQEQAELYHEQLLRAGLTMAPLEPEGS

SEQ ID NO: 2246 - protein, 95 aa, Thermosynechococcus elongatus
ASVVQQERQQVARKHYPNYKVIVLNDDFNTFQHVAACLMKYIPNMTSDRAWELTNQVHYVGQAIVWVGPQEQAELYHEQLLRAGLTMAPLEPKGS

SEQ ID NO: 2247 - protein, 36 aa, Thermosynechococcus elongatus
ASVVQQEGQQVTRKHYPNNKDIVLNDDINTIQHDVA

SEQ ID NO: 2248 - protein, 36 aa, Thermosynechococcus elongatus
ASVVQQEGQQVTRKHYPKYKVIVLNDDFNTFRHVAA

SEQ ID NO: 2249 - protein, 95 aa, Thermosynechococcus elongatus
ASVVQQEGQQVTRKHYPNYKVIVLNDDFNTFQHVVACLKKYIPNMTSDRAWELTNQVHYEGQAIVWVGPQEQAELYHEQLLRAGLTMAPLEPEGS

SEQ ID NO: 2250 - protein, 95 aa, Thermosynechococcus elongatus
ASVVQQEGQQVTRKHYPNYKVIVLNDDFNTFQHVVACLKKYIPNMISDRAWELTNQVHYGGRAIVWVGPQEQAELYHEQLLRAGLTMAPLEPGGS

SEQ ID NO: 2251 - protein, 95 aa, Thermosynechococcus elongatus
ASVVQQEGQQVTRKHYPNYKVIVLNDDFNTFRHVAACLMKYIPNMTSDRAWELTNQVHYEGQAIVWVGPQVQAELYHEQLLRAGLTMAPLEPGGS

SEQ ID NO: 2252 - protein, 36 aa, Thermosynechococcus elongatus
ASVVQQEGQQVTRKHYPNYKVIVLYDDFNTFQHVVA

SEQ ID NO: 2253 - protein, 95 aa, Thermosynechococcus elongatus
ASVVQQEVQQVTRKHYPNYKVIVMNDDFNTFRHVAACLMKYIPNMTSDRAWELTNQVHYEGQAIVWVGPQEQAELYHEQLLRAGLTIAPLEPEGS

SEQ ID NO: 2254 - protein, 95 aa, Thermosynechococcus elongatus
ASVVQQDRQHVTRKHYPNYKVIVLNDDFNSFRHVAACLMKYIPNMTSDRAWELTNQVHYKGQAIVWVGPQEQAELNHEQLLRAGLTMAPLEPEGS

SEQ ID NO: 2255 - protein, 95 aa, Thermosynechococcus elongatus
ASVVQQVGQQVTRKHYPNYKVIVLNDDFNTFRHVAACLMKYIPNMTSDRAWELTNQVHYEGQAIVWVGPQEQAELYHEQLLRAGLTMAPLEPEGS

SEQ ID NO: 2256 - protein, 6 aa, Thermosynechococcus elongatus
ASVVQQ

SEQ ID NO: 2257 - protein, 95 aa, Thermosynechococcus elongatus
ASVVPKERQQVARKHYPNYKVIVLNDDFNTFRHVAACLMKYIPNMTSDRAWELTNQVHYEGQAIVWVGPQEQAELYHEQLLRAGLTMAPLEPEGS

SEQ ID NO: 2258 - protein, 95 aa, Thermosynechococcus elongatus
ASVVPKERQQVARKHYPNYKVIVLNDDFNTFRHVAACLMKYIPNMTSDRAWELTNQVHYEGQAIVWVGPQVQAELYHEQLLRAGLTMAPLEPGGS

SEQ ID NO: 2259 - protein, 95 aa, Thermosynechococcus elongatus
ASVVPKERQQVASKHYPNYKVIVLNDDFNTFRHVAACLMKYIPNMTSDRAWELTNQVHYEGQAIVWVGPQVQAELYHEQLLRAGLTIAPLEPGGS

SEQ ID NO: 2260 - protein, 95 aa, Thermosynechococcus elongatus
ASVVPKERQQDTRKHYTNYKVIDLNDDFNTFRHEAACLMKYIPNMTSDRAWELTNHVLFDGLAIVWVGPLEQAELFLDLLLRAGLTMAPLEPEGS

SEQ ID NO: 2261 - protein, 95 aa, Thermosynechococcus elongatus
ASVVPKERQQDTRKHYPNYKVIVLNDDFNTFRHVAACLMKYIPNKTSDRAWELTNQVHYEGQAIVWVGPQEQAELYHEQLLRAGLTMAPLEPEGS

SEQ ID NO: 2262 - protein, 95 aa, Thermosynechococcus elongatus
ASVVPKERQQDTRKHYPNYKVIVLNDDFNTFRHVAACLMKYIPNMTSDRAWELTNQVHYEGQAIVWVGTQEQAELYHEQLLRAGLTMAPLEPEGS

SEQ ID NO: 2263 - protein, 95 aa, Thermosynechococcus elongatus
ASVVPKERQQDTRKHYPNYKVIVLNDDFNTFRHVAACLMKYIPNMTSDRAWELTNQVHYEGQAIVWVGPQVQAELYHEQLLRAGLTMAPLEPGGS

SEQ ID NO: 2264 - protein, 95 aa, Thermosynechococcus elongatus
ASVVPKERQQDTRKHYPNYKVIVLNDDFNTFRHVAACLMKYIPNMTSDRAWELTDQVHYEGQAIVWVGPQEQAELYHEQLLRAGLTMAPLEPEGS

SEQ ID NO: 2265 - protein, 95 aa, Thermosynechococcus elongatus
ASVVPKERQQVTRKHYPNYKVIVLNDDFNTFRHVAACLMKYIPNMTSDRAWELTNQVHYKGQAIVWVGPQEQAELNHEQLLRAGLTMAPLEPEGS

SEQ ID NO: 2266 - protein, 95 aa, Thermosynechococcus elongatus
ASVVPKEGQQVTRKHYPNYKVIVLNDDFNTFRHVAACLMKYIPNMTSDRAWELTNQVHYEGQAIVWVGPQVQAELYHEQLLRAGLTMAPLEPEGS

SEQ ID NO: 2267 - protein, 95 aa, Thermosynechococcus elongatus
ASVVPKEGQQVTRKHYPNYKVIVLNDDFNTFRHVAACLMKYIPNMTSDRAWELTNQVHYEGQSIVWVGPREQAELYHEQLLRVGLTMAPLEPEGS

SEQ ID NO: 2268 - protein, 58 aa, Thermosynechococcus elongatus
ASVVPKEGQQVTRKHYPNYKVIVLNDDFNTFQHVVACLKKYIPNMISDRAWELTNHVL

SEQ ID NO: 2269 - protein, 95 aa, Thermosynechococcus elongatus
ASVVPIERQQDTRKHYPIYMVIVLYDDFNTFRHVAACLMKYIPNMTSDRAWELTNQVHYEGQAIVWVGPQVQAELYHEQLLRAGLTMAPLEPGGS

SEQ ID NO: 2270 - protein, 95 aa, Thermosynechococcus elongatus
ASVVPQKRQQVARKHYPNNKVIFLNDDINTFRHVAASLMKYIPNMTSDRAWELTNQVHYEGQAIVWVGPQVQAELYHEQLLRAGLTMAPLEPEGS

SEQ ID NO: 2271 - protein, 95 aa, Thermosynechococcus elongatus
ASVVPQKRQQDTRKHNPNNKVIFLNDDFNTFRHVAACLMKYIPNKTSDRAWELTNQVHYEGQAIVWVGPQEQAELYHEQLLRAGLTMAPLEPEGS

SEQ ID NO: 2272 - protein, 95 aa, Thermosynechococcus elongatus
ASVVPQKRQQDTRKHYPNYKVIVLNDDFNTFQHVVACLKKYIPNMISDRAWELTNQVHYGGRAIVWVGPQEQAELYHEQLLRAGLTMAPLEPEGS

SEQ ID NO: 2273 - protein, 95 aa, Thermosynechococcus elongatus
ASVVPQKRQQDTRKHYPNYKVIVLNDDFNTFRHVAACLMKYIPNMTSDRAWELTNQVHYEGQAIVWVGPQEQAELYHEQLLRAGLTMAPLEPEGS

SEQ ID NO: 2274 - protein, 95 aa, Thermosynechococcus elongatus
ASVVPQKRQQVTRKHYPNYKVIVLNDDFNTFRHVAACLMKYIPNMTSDRAWELTNQVHYKGQAIVWVGPQEQAELYHEQLLRAGLTMAPLEPEGS

SEQ ID NO: 2275 - protein, 95 aa, Thermosynechococcus elongatus
ASVVPQKGQQGTRQHYPNYKGIVLNDDFNTFQHDAACLMKYIPPMTSDRAWELTNQVHYGGRAIVWVGPQEQAELYHEQLLRAGLTMAPLEPEGS

SEQ ID NO: 2276 - protein, 95 aa, Thermosynechococcus elongatus
ASVVPQKGQQVTRKHNPNNKVIVLNDDFNTLQHVVACLKKYIPNMISDRAWELTNQVHYGGRAIVWVGPQEQAELYHEQLLRAGLTMAPLEPEGS

SEQ ID NO: 2277 - protein, 95 aa, Thermosynechococcus elongatus
ASVVPQKGQQVTRKHNPNYKVIVLNDDFNTFQHVVACLKKYIPNMISDRAWELTNQVHYGGRAIVWVGPQEQAELYHEQLLRAGLTMAPLEPEGS

SEQ ID NO: 2278 - protein, 95 aa, Thermosynechococcus elongatus
ASVVPQKGQQVTRKHYPNYKVIVLNDDFNTFQHVVACLKKYIPNMISDRAWELTNQVHYGGRAIVWVGPQEQAELYHEQLLRAGLTMAPLEPEGS

SEQ ID NO: 2279 - protein, 95 aa, Thermosynechococcus elongatus; identical to SEQ ID NO: 2278

SEQ ID NO: 2280 - protein, 95 aa, Thermosynechococcus elongatus
ASVVPQKGQQVTRKHYPNYKVIVLNDDFNTFRHVAACLMKYIPNKTSDRAWELTNQVHYEGQAIVWVGPQVQAELYHEQLLRAGLTMAPLEPGGS

SEQ ID NO: 2281 - protein, 95 aa, Thermosynechococcus elongatus
ASVVPQKGQQVTRKHYPNYKVIVLNDDFNTFRHVAACLMKYIPNMTSDRAWELTNQVHYKGQAIVWVGPQEQAELNHEQLLRAGLTMAPLEPEGS

SEQ ID NO: 2282 - protein, 95 aa, Thermosynechococcus elongatus
ASVVPQQRQQVARKHYPNNKVIVLNDDFNTFRHVAACLMKYIPNMTSDRAWELTNQVHYEGQAIVWVGPQVQAELYHEQLLRAGLTMAPLEPGGS

SEQ ID NO: 2283 - protein, 95 aa, Thermosynechococcus elongatus
ASVVPQQRQQDTRKHYPNYKVIVLNDDFNTFRHVAACLMKYIPNMTSDRAWELTNQVHYGGRAIVWVGPQEQAELYHEQLLRAGLTMAPLEPEGS

SEQ ID NO: 2284 - protein, 21 aa, Thermosynechococcus elongatus
ASVVPQEDSKLLESTTQTTRL

SEQ ID NO: 2285 - protein, 95 aa, Thermosynechococcus elongatus
ASVVPQEKQQDTRKHYPNYKVIVLNDDFNTLRHVAACLMKYIPNMTSDRAWELTNQVHYEGQAIVWVGPQEQAELYHEQLLRAGLTMAPLEPEGS

SEQ ID NO: 2286 - protein, 95 aa, Thermosynechococcus elongatus
ASVVPQEKQQVTRKHYPNYKVIVLNDDFNTFRHVAACLMKYIPNMTSDRAWELTNQVHYKGQAIVWVGPQEQAELNHEQLLRAGLTMAPLEPEGS

SEQ ID NO: 2287 - protein, 95 aa, Thermosynechococcus elongatus
ASVVPQERKQDTRKHYPNYKVIVLNDDFNTFRHVAACLMKYIPNKTSDRAWELTNQVHYEGQAIVWVGPQEQAELYHEQLLRAGLTMAPLEPEGS

SEQ ID NO: 2288 - protein, 95 aa, Thermosynechococcus elongatus
ASVVPQERKQDTRKHYPNYKVIVLNDDFNTFRHVAACLMKYIPNMTSDRAWELTNQVHYEGQAIVWVGPQEQAELYHEQLLRAGLTMAPLEPEGS

SEQ ID NO: 2289 - protein, 95 aa, Thermosynechococcus elongatus; identical to SEQ ID NO: 24

SEQ ID NO: 2290 - protein, 95 aa, Thermosynechococcus elongatus; identical to SEQ ID NO: 1436

SEQ ID NO: 2291 - protein, 95 aa, Thermosynechococcus elongatus; identical to SEQ ID NO: 12

SEQ ID NO: 2292 - protein, 95 aa, Thermosynechococcus elongatus; identical to SEQ ID NO: 4

SEQ ID NO: 2293 - protein, 95 aa, Thermosynechococcus elongatus; identical to SEQ ID NO: 2

SEQ ID NO: 2294 - protein, 95 aa, Thermosynechococcus elongatus; identical to SEQ ID NO: 67

SEQ ID NO: 2295 - protein, 95 aa, Thermosynechococcus elongatus; identical to SEQ ID NO: 2

SEQ ID NO: 2296 - protein, 95 aa, Thermosynechococcus elongatus; identical to SEQ ID NO: 16

SEQ ID NO: 2297 - protein, 95 aa, Thermosynechococcus elongatus
ASVVPQERQQDTRKHYPNYKVIVLNDDFNTFRHVAACLMKYIPNMTSDRAWELTNQVHYEGQAIVWVGPQVQAGLYHEQLLRAGLTMAPLEPEGS

SEQ ID NO: 2298 - protein, 95 aa, Thermosynechococcus elongatus
ASVVPQERQQDTRKHYPNYKVIVLNDDFNTFRHVAACLMKYIPNMTSDRAWELTNQVHYEGQAIVWVGLQEQAELYHEQLLRAGLTMAPLEPEGS

SEQ ID NO: 2299 - protein, 95 aa, Thermosynechococcus elongatus; identical to SEQ ID NO: 28

SEQ ID NO: 2300 - protein, 95 aa, Thermosynechococcus elongatus; identical to SEQ ID NO: 28

SEQ ID NO: 2301 - protein, 95 aa, Thermosynechococcus elongatus
ASVVPQERQQDTRKHYPNYKVIVLNDDFNTFRHVAACLMKYIPNMISDRAWELTNQVHYGGRAIVWVGPQEQAELYHEQLLRAGLTMVPLEAEGS

SEQ ID NO: 2302 - protein, 95 aa, Thermosynechococcus elongatus
ASVVPQERQQDTRKHYPNCKVIVLNDDFNTFQHVVACLKKYIPNMISDRAWELTNQVHYGGRAIVWVGPQEQAELYHEQLLRAGLTMAPLEPEGS

SEQ ID NO: 2303 - protein, 95 aa, Thermosynechococcus elongatus
ASVVPQERQQDARKHYPNYKDIDLNDDFNTYRHVAACLMKYIPNMTSDRAWELTNQVHYIGQAIVLVGPQELAELNHEQLLRAGLTMAPLEPEGS

SEQ ID NO: 2304 - protein, 95 aa, Thermosynechococcus elongatus
ASVVPQERQQDARKHYPNYKVIVLNDDINTYRHVAACLMKYIPNMTSDRAWELTNQVHYEGQAIVWVGPLVQAELYHEQLLRAGLTLAPLEPGGS

SEQ ID NO: 2305 - protein, 95 aa, Thermosynechococcus elongatus
ASVVPQERQQDARKHYPNYKVIVLNDDFNTIRHVAACLMKYIPNMTSDRAWELTNQVHYEGQAIVWVGPQVQAELYHELLLCAGLTMAPLEPGGS

SEQ ID NO: 2306 - protein, 95 aa, Thermosynechococcus elongatus
ASVVPQERQQDARKHYPNYKVIVLNDDFNTFQHVVACLKKYIPNMISDRAWELTNQVHYEGQAIVWVGPQEQAELYHEQLLRAGLTMAPLEPGGS

SEQ ID NO: 2307 - protein, 95 aa, Thermosynechococcus elongatus
ASVVPQERQQDARKHYPNYKVIVLNDDFNTFRHVAACLMKYIPNKTSDRAWELTNQVHYEGQAIVWVGPQEQAELYHEQLLRAGLTMAPLEPEGS

SEQ ID NO: 2308 - protein, 40 aa, Thermosynechococcus elongatus
ASVVPQERQQDARKHYPNYKFIVLNDDFNTFRHVAACLMK

SEQ ID NO: 2309 - protein, 95 aa, Thermosynechococcus elongatus
ASVVPQERQQAARKHYPNYKVIVLNDDFNTFRHVAACLMKYIPNMTSDRAWELTNQVHYEGQAIVWVGPQVQAELYHEQLLRAGLTMAPLEPGGS

SEQ ID NO: 2310 - protein, 23 aa, Thermosynechococcus elongatus
ASVVPQERQQVARKHYTNYKVID

SEQ ID NO: 2311 - protein, 95 aa, Thermosynechococcus elongatus
ASVVPQERQQVARKHYPNYKVIVLNDDFNTYRHVAACLMKYIPNMTSDRAWELTNQVHYEGQAIVWVGPQEQAELNHEQLLRAGLTMAPLEPEGS

SEQ ID NO: 2312 - protein, 95 aa, Thermosynechococcus elongatus
ASVVPQERQQVARKHYPNYKVIVLNDDFNTNRHVAACLMKYIPNMTTDRAWELTNKVHYEGQAIVWVGPLVQAELYHEQLLRAGLTMAPLEPGGS

SEQ ID NO: 2313 - protein, 95 aa, Thermosynechococcus elongatus; identical to SEQ ID NO: 6

SEQ ID NO: 2314 - protein, 95 aa, Thermosynechococcus elongatus
ASVVPQERQQVARKHYPNYKVIVLNDDFNTFRHVAACLMKYIPNMTSDRAWELTNQVHYEGQAIVWVGPQEQAELYHEQLLRAGFTMAPLEPEGS

SEQ ID NO: 2315 - protein, 95 aa, Thermosynechococcus elongatus; identical to SEQ ID NO: 3

SEQ ID NO: 2316 - protein, 95 aa, Thermosynechococcus elongatus; identical to SEQ ID NO: 531

SEQ ID NO: 2317 - protein, 95 aa, Thermosynechococcus elongatus
ASVVPQERQQVARNHYPNYKVIVLNDDFNTFRHVAACLMKYIPNMTSDRAWELTNQVHYEGQAIVWVGPQVQAELYHDQLLRAGLTMAPLDPGGS

SEQ ID NO: 2318 - protein, 95 aa, Thermosynechococcus elongatus; identical to SEQ ID NO: 3

SEQ ID NO: 2319 - protein, 95 aa, Thermosynechococcus elongatus; identical to SEQ ID NO: 35

SEQ ID NO: 2320 - protein, 95 aa, Thermosynechococcus elongatus
ASVVPQERQQVTRKHHPNYKVIVLNDDFNTFRQVAACLMKYIQNMTSDRAWELTNQVHYGGRAIVWVGPQEQAELYHEQLLRAGLTMAPLEPEGS

SEQ ID NO: 2321 - protein, 95 aa, Thermosynechococcus elongatus
ASVVPQERQQVTRKHYPNYKVIVLNEDFNTFQHVVACLKKYIPNMISDRAWELTNQVHYGGRAIVWVGPQEQAELYHEQLLRAGLTMAPLEPEGS

SEQ ID NO: 2322 - protein, 95 aa, Thermosynechococcus elongatus; identical to SEQ ID NO: 597

SEQ ID NO: 2323 - protein, 95 aa, Thermosynechococcus elongatus
ASVVPQERQQVTRKHYPNYKVIVLNDDFNTFQHVVACLKKYIPNMISDRAWELTNQVHYGGRAIVWVGPQEQAELYHEQLLRAGLSMAPLEPEGS

SEQ ID NO: 2324 - protein, 95 aa, Thermosynechococcus elongatus
ASVVPQERQQVTRKHYPNYKVIVLNDDFNTFQHVVACLKKYIPNMISDRAWELTNQVHYGGRAIVWVGPQEQAELYNEQLLRAGLTMAPLEPEGS

SEQ ID NO: 2325 - protein, 95 aa, Thermosynechococcus elongatus
ASVVPQERQQVTRKHYPNYKVIVLNDDFNTFQHVVACLKKYIPNMISDRAWELTNQVHYGCRAIVWVGPQEQAELYHEQLLRAGLTMAPLEPEGS

SEQ ID NO: 2326 - protein, 95 aa, Thermosynechococcus elongatus
ASVVPQERQQVTRKHYPNYKVIVLNDDFNTFQHVVACLMKYIPNMTSDRAWELTNQVHYEGQAIVRVGPQEQAELYHKQLLRAGLTMAPLEPEGS

SEQ ID NO: 2327 - protein, 95 aa, Thermosynechococcus elongatus; identical to SEQ ID NO: 764

SEQ ID NO: 2328 - protein, 95 aa, Thermosynechococcus elongatus
ASVVPQERQQVTRKHYPNYKVIVLNDDFNTFRHIAACLMKYIPNMTSDRAWELTNQVHYKGQAIVWVGPQEQAELNHEQLLRAGLTMAPLEPEGS

SEQ ID NO: 2329 - protein, 95 aa, Thermosynechococcus elongatus; identical to SEQ ID NO: 78

SEQ ID NO: 2330 - protein, 95 aa, Thermosynechococcus elongatus
ASVVPQERQQVTRKHYPNYKVIVLNDDFNTFRHVAACLMKYIPNMTSDRAWELTNQVHYKGQAIVWVGLQEQAELNHEQLLRAGLTMAPLEPEGS

SEQ ID NO: 2331 - protein, 95 aa, Thermosynechococcus elongatus; identical to SEQ ID NO: 1731

SEQ ID NO: 2332 - protein, 95 aa, Thermosynechococcus elongatus; identical to SEQ ID NO: 87

SEQ ID NO: 2333 - protein, 95 aa, Thermosynechococcus elongatus; identical to SEQ ID NO: 32

SEQ ID NO: 2334 - protein, 95 aa, Thermosynechococcus elongatus; identical to SEQ ID NO: 778

SEQ ID NO: 2335 - protein, 95 aa, Thermosynechococcus elongatus
ASVVPQERQQVTRKHYPNYKVIVLNDDFNTFRHVAACLMKYIPNMTSDRAWELTDQVHYEGQAIVWVGPQEQAELYHEQLLRAGLTMAPLEPEGS

SEQ ID NO: 2336 - protein, 95 aa, Thermosynechococcus elongatus; identical to SEQ ID NO: 5

SEQ ID NO: 2337 - protein, 95 aa, Thermosynechococcus elongatus
ASVVPQERQQVTRKHYPNYKVIVLNDDFNTFRHVAACLMKYIPNMTSDRAWELTNQVHYKGQAIVWVGPQEQAELNHEQLLRAGLTMTPLEPEGS

SEQ ID NO: 2338 - protein, 95 aa, Thermosynechococcus elongatus; identical to SEQ ID NO: 5

SEQ ID NO: 2339 - protein, 95 aa, Thermosynechococcus elongatus; identical to SEQ ID NO: 5

SEQ ID NO: 2340 - protein, 95 aa, Thermosynechococcus elongatus; identical to SEQ ID NO: 55

SEQ ID NO: 2341 - protein, 95 aa, Thermosynechococcus elongatus; identical to SEQ ID NO: 141

SEQ ID NO: 2342 - protein, 95 aa, Thermosynechococcus elongatus; identical to SEQ ID NO: 25

SEQ ID NO: 2343 - protein, 95 aa, Thermosynechococcus elongatus; identical to SEQ ID NO: 47

SEQ ID NO: 2344 - protein, 95 aa, Thermosynechococcus elongatus
ASVVPQERQQVTRKHYPNYKVIVLNDDFNTFRHVAACLMKYIPNMTSDRAWELTNQVHYGGRAIVWVGPREQAELYHEQLLRVGLTMAPLEPEGS

SEQ ID NO: 2345 - protein, 95 aa, Thermosynechococcus elongatus
ASVVPQERQQVTRKHYPNYKVIVLNDDFNTFRHVAACLMKYIANKTSDRAWELTNQVHYEGQAIVWVGPQVQAELYHEQLLRAGLTMAPLEPEGS

SEQ ID NO: 2346 - protein, 95 aa, Thermosynechococcus elongatus
ASVVPQERQQVDRKHYPNYKDIVLNDDFNTFRHVAACLMKYIPNMTSDRDWDLTNQVHYEGLAIVWVGPQVQAELYHEQSLRAGLSMAPLERGGS

SEQ ID NO: 2347 - protein, 77 aa, Thermosynechococcus elongatus
ASVVPQERQQVDRKHYPNYKVIVLNDDFNTFRHVAACLIKYIPNMNSDRAWELTNQVHYVCQAIVWVGPQERAELYH

SEQ ID NO: 2348 - protein, 51 aa, Thermosynechococcus elongatus
ASVVPQERQQVDRKHYPNYKVIVLNDDFNTFRHFAACLMKYIPNMTSDRAC

SEQ ID NO: 2349 - protein, 95 aa, Thermosynechococcus elongatus
ASVVPQERQQVDRKHYPNYKVIVLNDDFNTFRHVAACLMKYIPNMTSDRAWELTNQVHYEGQAIVWVGPQVQAELYHEQLLRAGLTMAPLEPGGS

SEQ ID NO: 2350 - protein, 95 aa, Thermosynechococcus elongatus
ASVVPQERQQVARKHYPNYKVRVLNDDFNTIRHVAACLMKYIPNMTSDRAWELTNQVHYEGLAIVWVGPQVQAELYHEQLLRAGLTMAPLEPGGS

SEQ ID NO: 2351 - protein, 95 aa, Thermosynechococcus elongatus; identical to SEQ ID NO: 3

SEQ ID NO: 2352 - protein, 95 aa, Thermosynechococcus elongatus
ASVVPQERQQVARKHYPNYKVIVLNDDFNTFRHVAACLMKYIPHMTSDRAWELTNQVHYEGQAIVWVGPQVQAELYHEQLLRAGLTMAPLEPGGS

SEQ ID NO: 2353 - protein, 21 aa, Thermosynechococcus elongatus
ASVVPQERQQVAKSTTQTTRL

SEQ ID NO: 2354 - protein, 95 aa, Thermosynechococcus elongatus; identical to SEQ ID NO: 3

SEQ ID NO: 2355 - protein, 95 aa, Thermosynechococcus elongatus; identical to SEQ ID NO: 681

SEQ ID NO: 2356 - protein, 95 aa, Thermosynechococcus elongatus
ASVVPQERQQVARKHNPNYKVIVLNDDFNTFRHVAACLMKYIPNMTSDRAWELTNQVHYEGQAIVWVGPQEQAELYHEQLLRAGLTMAPLEPEGS

SEQ ID NO: 2357 - protein, 95 aa, Thermosynechococcus elongatus; identical to SEQ ID NO: 2356

SEQ ID NO: 2358 - protein, 95 aa, Thermosynechococcus elongatus
ASVVPQERQQVARKHNPNYKVIVLNDDFNTFRHVAACLMKYIPNMTSDRAWELTNQVHYEGQAIVWVGPQVQAELYHEQLLRAGLTMAPLEPGGS

SEQ ID NO: 2359 - protein, 95 aa, Thermosynechococcus elongatus
ASVVPQERQQVARKHHPNYKVIVLNDDFNTFRHGAACLMKYIPNMTSDRAWELTNQVHYEGQAIVWVGPQEQAELYHEQLLRAGLTMAPLEPEGS

SEQ ID NO: 2360 - protein, 95 aa, Thermosynechococcus elongatus
ASVVPQERQQVARKHHPNYKVIVLNDDFNTFRHVAACLMKYIPNMTSDRAWELTNQVHYKGQAIVWVGPQEQAELNHEQLLRAGLTMAPLEPEGS

SEQ ID NO: 2361 - protein, 95 aa, Thermosynechococcus elongatus; identical to SEQ ID NO: 206

SEQ ID NO: 2362 - protein, 95 aa, Thermosynechococcus elongatus
ASVVPQERQQVARKHHPNYKVIVLNDDFNTFRHVAACLMKYIPNMISDRAWELTNQVHYGGRAIVWVGPQEQAELYHEQLLRAGLTMAPLEPEGS

SEQ ID NO: 2363 - protein, 95 aa, Thermosynechococcus elongatus
ASVVPQERQQVARKHHPNYKVIVLNYDFNTFRHVAACLMKYIPNMTSDRAWELTNQVHYEGQAIVWVGPQEQAELYHEQLLRAGLTMAPLEPEGS

SEQ ID NO: 2364 - protein, 95 aa, Thermosynechococcus elongatus
ASVVPQERQQVARKHHPNYKVIVLNDDFNTFRHVAACLMKYIPNMTSDRAWELTNQVHYEGQAIVWVGPQVQAELYHEQLLRAGLTMAPLEPEGS

SEQ ID NO: 2365 - protein, 15 aa, Thermosynechococcus elongatus
ASVVPQERQQVARKH

SEQ ID NO: 2366 - protein, 15 aa, Thermosynechococcus elongatus
ASVVPQERQQVARKH

SEQ ID NO: 2367 - protein, 15 aa, Thermosynechococcus elongatus
ASVVPQERQQVARKH

SEQ ID NO: 2368 - protein, 95 aa, Thermosynechococcus elongatus
ASVVPQERQQVARKHYTNYKVIVLNDDFNTFQHVVACLKKYIPNMISDRAWELTNQVHYGGRAIVWVGPQEQAELYHEQLLRAGLTMAPLEPEGS

SEQ ID NO: 2369 - protein, 95 aa, Thermosynechococcus elongatus
ASVVPQERQQVARKHYTNYKVIVLNDDFNTFRHVDACLMKYIPNMTSDRAWELTNQVHYEGQAIVCVGPQVQAELYHEQLLRAGLTMAPFEPGGS

SEQ ID NO: 2370 - protein, 95 aa, Thermosynechococcus elongatus
ASVVPQERQQVARKHYTNYKVIVLNDDFNTFRHVAACLMKYIPNMTSDRAWELTNQVHYEGQAIVWVGPQEQAELYHEQLLRAGLTMAQLEPEGS

SEQ ID NO: 2371 - protein, 95 aa, Thermosynechococcus elongatus
ASVVPQERQQVARKHYQNYKVIVLNDDFNTFRHVAACLMKYIPNMTSDRAWELTNQVHYEGQAIVWVGPQEQAELYHEQLLRAGLTMAPLEPEGS

SEQ ID NO: 2372 - protein, 95 aa, Thermosynechococcus elongatus
ASVVPQERQQVARKHYQNYKVIVLNDDFNTFRHVAACLMKYIPNKTSDRAWELTNQVHYEGQAIVWVGPQEQAELYHEQLLRAGLTMAPLEPEGS

SEQ ID NO: 2373 - protein, 95 aa, Thermosynechococcus elongatus; identical to SEQ ID NO: 2371

SEQ ID NO: 2374 - protein, 95 aa, Thermosynechococcus elongatus
ASVVPQERQQVARKHYQNYKVIVLNDDFNTFRHVAACLMKYIPNMTSDRAWELTNQVHYEGQAIVWVGPQVQAELYHEQLLRAGLTMAPLEPEGS

SEQ ID NO: 2375 - protein, 95 aa, Thermosynechococcus elongatus
ASVVPQERQQVARKHYQNYKVIVLNDDFNTFRHVAACLMKYIPNMTSDRAWELTNQVHYKGQAIVWVGPQEQAELNHEQLLRAGLTMAPLEPEGS

SEQ ID NO: 2376 - protein, 95 aa, Thermosynechococcus elongatus
ASVVPQERQQVARKHYPKYKVIVLNDDFNTFQHVVACLKKYIPNMISDRAWELTNQVHYKGQAIVWVGPQEQAELNHEQLLRAGLTMAPLEPEGS

SEQ ID NO: 2377 - protein, 95 aa, Thermosynechococcus elongatus; identical to SEQ ID NO: 1809

SEQ ID NO: 2378 - protein, 95 aa, Thermosynechococcus elongatus
ASVVPQERQQVARKHYPKYKVIVLNDDFNTFRHVAACLMKYIPNMISDRAWELTNQVHYGGRAIVWVGPQEQAELYHEQLLRAGLTMAPLEPEGS

SEQ ID NO: 2379 - protein, 95 aa, Thermosynechococcus elongatus
ASVVPQERQQVARKHYPNNKVIVLNDDFNTLQHVVACLMKYIPNMTSDRAWELTNQVHYEGQAIVWVGPQVQAELYHEQLLRAGLTMAPLEPGGS

SEQ ID NO: 2380 - protein, 95 aa, Thermosynechococcus elongatus
ASVVPQERQQVARKHYPNNKVIVLNDDFNTFRHVAACLMKYIPNMTSDRAWELTNQVHYEGQAIVWVGPQVQAELYHEQLLRAGLTMAPLEPEGS

SEQ ID NO: 2381 - protein, 18 aa, Thermosynechococcus elongatus
ASVVPQERQQVARKHYPN

SEQ ID NO: 2382 - protein, 18 aa, Thermosynechococcus elongatus
ASVVPQERQQVARKHYPN

SEQ ID NO: 2383 - protein, 95 aa, Thermosynechococcus elongatus; identical to SEQ ID NO: 1286

SEQ ID NO: 2384 - protein, 95 aa, Thermosynechococcus elongatus; identical to SEQ ID NO: 6

SEQ ID NO: 2385 - protein, 95 aa, Thermosynechococcus elongatus; identical to SEQ ID NO: 451

SEQ ID NO: 2386 - protein, 95 aa, Thermosynechococcus elongatus; identical to SEQ ID NO: 9

SEQ ID NO: 2387 - protein, 95 aa, Thermosynechococcus elongatus; identical to SEQ ID NO: 3

SEQ ID NO: 2388 - protein, 95 aa, Thermosynechococcus elongatus; identical to SEQ ID NO: 35

SEQ ID NO: 2389 - protein, 95 aa, Thermosynechococcus elongatus
ASVVPQERQQVARKHYPNYKDIVLNDDFNTFRHVAACLMKYIPNMTSDRAWELTNQVHYEGQAIVWVGPQVQAELYHEQLLRAGLTLAPLEPGGS

SEQ ID NO: 2390 - protein, 23 aa, Thermosynechococcus elongatus
ASVVPQERQQVARKHYPNYKDIV

SEQ ID NO: 2391 - protein, 23 aa, Thermosynechococcus elongatus
ASVVPQERQQVARKHYPNYKDIV

SEQ ID NO: 2392 - protein, 95 aa, Thermosynechococcus elongatus
ASVVPQERQQVARKHYPNYKDIVLNDDYNTIRHVAACLMKYIPNMISDRAWELTNQVHYGGRAIVWVGPQEQAELYHEQLLRAGLTMAPLEPGGS

SEQ ID NO: 2393 - protein, 95 aa, Thermosynechococcus elongatus
ASVVPQERQQVARKHYPNYKDIVLNDDYNTFRHVAASLMKYIPNMTSDRAWELTNQVLYEGQAIVCVGPQVQAELFHEQLLRAGLTLAPLEPGGS

SEQ ID NO: 2394 - protein, 95 aa, Thermosynechococcus elongatus
ASVVPQERQQVARKHYPNYKDIVLNDDYNTFRHVAACLMKYIPNKTSDRACELTNQVHFVGQAIVWVGPQERAELYHEQLLRAGLTLAPLVPEGS

SEQ ID NO: 2395 - protein, 95 aa, Thermosynechococcus elongatus
ASVVPQERQQVARKHYPNYKDIVLNDDFNTIQHVDACLKKYIPNLISDRAWELTNQVHYGGRAIVWVGPQEQAELYHELLWCAGLSMAPLEPGGS

SEQ ID NO: 2396 - protein, 95 aa, Thermosynechococcus elongatus
ASVVPQERQQVARKHYPNYKDIVLNDDFNTIRHDAACLMKYIPNMTSDRAWELTNQVHYGGRAIVWVGPQEQAELYHEQLWRAGLTRAPLEPEGS

SEQ ID NO: 2397 - protein, 95 aa, Thermosynechococcus elongatus
ASVVPQERQQVARKHYPNYKDIVLNDDFNTIRHVAACMMKYIPNMTSDRAWELTNQVQFGGRAIVWVGPQEQADLYHEQLLRAGLTLAPLEPGGS

SEQ ID NO: 2398 - protein, 95 aa, Thermosynechococcus elongatus
ASVVPQERQQVARKHYPNYKDIVLNDDFNTIRHVAACLMKYIPNMTSDRAWELTNQVHFEGLAIVWVGPQVQAELYHEQLLRAGLTMAPLEPEGS

SEQ ID NO: 2399 - protein, 95 aa, Thermosynechococcus elongatus
ASVVPQERQQVARKHYPNYKDIVLNDDFNTYRHVAACLMKYIPNMTSDRAWELTNQVHYEGQAIVWVGPQVQAELYHEQLLRAGLTMAPLEPGGS

SEQ ID NO: 2400 - protein, 95 aa, Thermosynechococcus elongatus
ASVVPQERQQVARKHYPNYKDIVLNDDFNTFRHDSACLMKYIPNMTSDRAWELTNQVHYEGQAIVWVGPQVQAELYHEQLLRAGLTMAPLEPGGS

SEQ ID NO: 2401 - protein, 95 aa, Thermosynechococcus elongatus
ASVVPQERQQVARKHYPNYKDIVLNDDFNTFRHVAASLMKYIPNMTSDRAWELTNQVHYEGQAIVWVGPQVQAELYHEQLLRAGLTLAPLEPGGS

SEQ ID NO: 2402 - protein, 58 aa, Thermosynechococcus elongatus
ASVVPQERQQVARKHYPNYKDIVLNDDFNTFRHVAACMMKYIPNMTSDRACELTNHVH

SEQ ID NO: 2403 - protein, 95 aa, Thermosynechococcus elongatus; identical to SEQ ID NO: 2389

SEQ ID NO: 2404 - protein, 95 aa, Thermosynechococcus elongatus
ASVVPQERQQVARKHYPNYKDIVLNDDFNTFRHVAACLMKYIPNMTSDRAWELTNQVHYEGLAIVWVGPQVQAELYHEQLLRAGLTMAPLEPGGS

SEQ ID NO: 2405 - protein, 77 aa, Thermosynechococcus elongatus
ASVVPQERQQVARKHYPNYKDIVLNDDFNTFRHVAACLMKYIPNMTSDRAWELTNQVHFEGQAIVWVGPQVQAELYQ

SEQ ID NO: 2406 - protein, 95 aa, Thermosynechococcus elongatus
ASVVPQERQQVARKHYPNYKDIVLNDDFNTFRHVAACLMKYIPNMTSDRAWELTNQVLYEGQAIVWVGPQVQAELYHEQLLRAGLTMAPLEPGGS

SEQ ID NO: 2407 - protein, 95 aa, Thermosynechococcus elongatus
ASVVPQERQQVARKHYPNYKDIVLNDDFNTFRHVAACLMKYIPNMTSDRAWELTNHVHYEGLAIVWVGQQVQAELYHEQLLRAGLTMAPLVPEGS

SEQ ID NO: 2408 - protein, 95 aa, Thermosynechococcus elongatus
ASVVPQERQQVARKHYPNYKGIVLNDDFNTFQHVVACLKKYIPNMISDRAWELTNQVHYGGRAIVWVGPQEQAELYHEQLLRAGLTMAPLEPEGS

SEQ ID NO: 2409 - protein, 95 aa, Thermosynechococcus elongatus
ASVVPQERQQVARKHYPNYKGIVLNDDFNTFQHVVVCLKKYIPNMISDRAWELTNQVHYGGRAIVWVGPQEQAELYHEQLLRAGLTMAPLEPEGS

SEQ ID NO: 2410 - protein, 95 aa, Thermosynechococcus elongatus
ASVVPQERQQVARKHYPNYKGIVLNDDFNTFRHVAACLMKYIPNMTSDRAWELTNQVHYEGQAIVWVGPQEQAELNHEQLLRAGLTMAPLEPEGS

SEQ ID NO: 2411 - protein, 95 aa, Thermosynechococcus elongatus
ASVVPQERQQVARKHYPNYKGIVLNDDFNTFRHVAACLMKYIPNMTSDRAWELTNQVHYEGQAIVWVGPQEQAELYHEQLLRAGLTMAPLEPEGS

SEQ ID NO: 2412 - protein, 95 aa, Thermosynechococcus elongatus
ASVVPQERQQVARKHYPNYKGIVLNDDFNTFRHVAACLMKYIPNMTSDRAWELTNQVHYEGQAIVWVGPQVQAELYHEQLLRAGLTMAPLEPEGS

SEQ ID NO: 2413 - protein, 95 aa, Thermosynechococcus elongatus
ASVVPQERQQVARKHYPNYKGIVLNDDFNTFRHVAACLMKYIPNMTSDRAWELTNHVHYEGQAIVWVGPQVQAELYHEQLLRAGLTMAPLEPGGS

SEQ ID NO: 2414 - protein, 95 aa, Thermosynechococcus elongatus
ASVVPQERQQVARKHYPNYKGIVLNDDFNTFRHVAACLMKYIPNMTSDRAWELTNHVHYEGQAIVWVGPQVQAELYHEHLLRACLTMAPLEPGGS

SEQ ID NO: 2415 - protein, 95 aa, Thermosynechococcus elongatus
ASVVPQERQQVARKHYPNYKGIVLNDDFNTFRHVAACLMKYIPNMTSDRAWELTNHVHYTGQAIVWGGPQEQAEVNHEQLLRAGLTMAPLEPEGS

SEQ ID NO: 2416 - protein, 95 aa, Thermosynechococcus elongatus
ASVVPQERQQVARKHYPNYKGIVLNDDFYTFRHVAACLMKYIPNKTSDRAWELTNQVHYEGQAIVWVGPQEQAELYHEQLLRAGLTMAPLEPGGS

SEQ ID NO: 2417 - protein, 95 aa, Thermosynechococcus elongatus
ASVVPQERQQVARKHYPNYKGLVLNDDFNTFQHVVACLKKYIPNMISDRAWELTNQVHYGGRAIVWVGPQEQAELYHEQLLRAGLTMAPLEPEGS

SEQ ID NO: 2418 - protein, 95 aa, Thermosynechococcus elongatus
ASVVPQERQQVARKHYPNYKVIVLNDYFNTFLHDPAWLMNYIPKMTSDRAWELTNQVLYVGQAIVWVGPQVQAELYDEQLLISGLTMARLEPGGS

SEQ ID NO: 2419 - protein, 95 aa, Thermosynechococcus elongatus
ASVVPQERQQVARKHYPNYKVRVLNDDFNTFRHVAACVMKYIPNMTSDRAWELTNQVHSEGQAIVWVGPQVQAELYHEHLLRAGLTMAPLEPEGS

SEQ ID NO: 2420 - protein, 95 aa, Thermosynechococcus elongatus; identical to SEQ ID NO: 650

SEQ ID NO: 2421 - protein, 95 aa, Thermosynechococcus elongatus; identical to SEQ ID NO: 19

SEQ ID NO: 2422 - protein, 95 aa, Thermosynechococcus elongatus; identical to SEQ ID NO: 336

SEQ ID NO: 2423 - protein, 95 aa, Thermosynechococcus elongatus; identical to SEQ ID NO: 6

SEQ ID NO: 2424 - protein, 95 aa, Thermosynechococcus elongatus; identical to SEQ ID NO: 9

SEQ ID NO: 2425 - protein, 95 aa, Thermosynechococcus elongatus; identical to SEQ ID NO: 1311

SEQ ID NO: 2426 - protein, 95 aa, Thermosynechococcus elongatus
ASVVPQERQQVARKHYPNYKVIVLNDDFNTFRHVAACLMKYIPNMTSDRAWELTNQVHYEGRAIVWVGPQEQAELYHEQLLRAGLTMATLEPEGS

SEQ ID NO: 2427 - protein, 95 aa, Thermosynechococcus elongatus; identical to SEQ ID NO: 38

SEQ ID NO: 2428 - protein, 95 aa, Thermosynechococcus elongatus
ASVVPQERQQVARKHYPNYKVIVLNDDFNTFRHVAACLMKYIPNMTSDRAWELTNQVHYGGRAIVWVGPQEQSELYHEQLLRAGLTMAPLEPEGS

SEQ ID NO: 2429 - protein, 95 aa, Thermosynechococcus elongatus
ASVVPQERQQVARKHYPNYKVIVLNDDFNTFRHVAACLMKYIPNMISDRAWELTNQVHYGGRAIVWVGPQEQAELYHEHLLRAGLTMAPLEPEGS

SEQ ID NO: 2430 - protein, 58 aa, Thermosynechococcus elongatus
ASVVPQERQQVARKHYPNYKVIVLNDDFNTFRHVAACLMKYIPKMTSDRAWELTNHVL

SEQ ID NO: 2431 - protein, 95 aa, Thermosynechococcus elongatus; identical to SEQ ID NO: 1235

SEQ ID NO: 2432 - protein, 90 aa, Thermosynechococcus elongatus
ASVVPQERQQVARKHYPNYKVRVLNDDFNTFRHVAACLMKYIPNMTSDRAWELTNQVHYEGQAIVWVGPQGQAELYHEQLLRAGLTMAPL

SEQ ID NO: 2433 - protein, 95 aa, Thermosynechococcus elongatus
ASVVPQERQQVARKHYPNYKVRVLNDDFNTFRHVAACLMKYIPNMTSDRAWELTNQVHYEGQAIVWVGPQVQAELYHEQLLRAGLTMAPLEPGGS

SEQ ID NO: 2434 - protein, 95 aa, Thermosynechococcus elongatus
ASVVPQERQQVARKHYPNYKVRVLNDDFNTFRHVAACLMKYIPNMTSDRAWELTNQVHYGGRAIVWVGPQEQAELYHEQLLRAGLTMAPLEPGGS

SEQ ID NO: 2435 - protein, 95 aa, Thermosynechococcus elongatus
ASVVPQERQQVARKHYPNYKVRVLNDDFNTFRHVAACLMKYIPNMISDRAWELTNQVHYGGRAIVWVGPQEQAELYHEQLLRAGLTMAPLEPEGS

SEQ ID NO: 2436 - protein, 95 aa, Thermosynechococcus elongatus
ASVVPQERQQVARKHYPNYKVRVLNDDFNTFRHVAAWLMKYIPNMTSDRAWELTNQVHYKGQAIVWVGPQEQAELNHEQLLRAGLTMAPLEPEGS

SEQ ID NO: 2437 - protein, 95 aa, Thermosynechococcus elongatus
ASVVPQERQQVARKHYPNYKVIILNDDFNTFQHVAACLMKYIPNKTSDRAWELTNQVHYEGQAIVWVGPQEQAELYHEQLLRAGLTMAPLEPEGS

SEQ ID NO: 2438 - protein, 95 aa, Thermosynechococcus elongatus
ASVVPQERQQVARKHYPNYKVIILNDDFNTFQHVAACLMKYIPNMTSDRAWELTNQVHYKGQAIVWVGPQEQAELNHEQLLRAGLTMAPLEPEGS

SEQ ID NO: 2439 - protein, 95 aa, Thermosynechococcus elongatus
ASVVPQERQQVARKHYPNYKVIILNDDFNTFQHVAACLMKYIPNMTSDRAWELTNQVHYEGQAIVRVGPQEQAELYHKQLLRAGLTMAPLEPGGS

SEQ ID NO: 2440 - protein, 95 aa, Thermosynechococcus elongatus
ASVVPQERQQVARKHYPNYKVIILNDDFNTFQHVAACLMKYIPNMTSDRAWELTNQVHYEGQAIVRVGPQEQAELYHEQLLRAGMTMAPLEPEGS

SEQ ID NO: 2441 - protein, 95 aa, Thermosynechococcus elongatus
ASVVPQERQQVARKHYPNYKVIILNDDFNTFQHVAACLMKYIPNMTSDRAWELTNQVHYEGQAIVRVGPQEQAELYHEQLLRAGLTMAPLEPEGS

SEQ ID NO: 2442 - protein, 95 aa, Thermosynechococcus elongatus; identical to SEQ ID NO: 2441

SEQ ID NO: 2443 - protein, 95 aa, Thermosynechococcus elongatus
ASVVPQERQQVARKHYPNYKVIILNDDFNTFQHVVACLKKYIPNMISDRAWELTNQVHYGGRAIVWVGPQEQAELYHEQLLRAGLTMAPLEPEGS

SEQ ID NO: 2444 - protein, 95 aa, Thermosynechococcus elongatus
ASVVPQERQQVARKHYPNYKVIILNDDFNTFQLVAACLMKYIPNMTSDRAWELTNQVHYEGQAIVRVGPQEQAELYHKQLLRAGLTMAPLEPEGS

SEQ ID NO: 2445 - protein, 95 aa, Thermosynechococcus elongatus
ASVVPQERQQVARKHYPNYKVIILNDDFNTFRHVAACLMKYIPNMTSDRAWELTNQVHYEGQAIVWVGPQEQAELYHEQLLRAGLTMAPLEPEGS

SEQ ID NO: 2446 - protein, 95 aa, Thermosynechococcus elongatus
ASVVPQERQQVARKHYPNYKVILLNDDFNTFRHVAACLMKYIPNMTSDRAWELTNQVHYEGQAIVWVGPQEQAELYHEQLLRAGLTMAPLEPEGS

SEQ ID NO: 2447 - protein, 95 aa, Thermosynechococcus elongatus
ASVVPQERQQVARKHYPNYKVIDLNDDFNTFRHVAACLMKYIPNMTTDRACELTNQVHYEGQSIVWVGPQVQAELYHEQLLRAGLTMAPLEPGGS

SEQ ID NO: 2448 - protein, 95 aa, Thermosynechococcus elongatus
ASVVPQERQQVARKHYPNYKVIDLNDDFNTFRHVAACLMKYIPNMTSDRAWELTNQVHYEGQAIVWVGPQVQAELYHEQLLRAGLTMAPLEPEGS

SEQ ID NO: 2449 - protein, 95 aa, Thermosynechococcus elongatus
ASVVPQERQQVARKHYPNYKVIDLNDDFNTFRHVAACLMKYIPNMTSDRAWELTNQVHYEGQAIVWVGPQVQAELYHEQLLRAGLTMAPLEPGGS

SEQ ID NO: 2450 - protein, 95 aa, Thermosynechococcus elongatus
ASVVPQERQQVARKHYPNYKVIDLNDDFNTFRHVAACLMKYIPNMTSDRAWELTNQVHFEGQAIVWVGPQVQAELYHEQLLRAGLTIAPLEPGGS

SEQ ID NO: 2451 - protein, 95 aa, Thermosynechococcus elongatus
ASVVPQERQQVARKHYPNYKVIDLNDDFNTFRHVAAWLMKYIPNMTSDRAWELTNQVHYEGQAIVWVGPQVQAELYHEQLLRAGLTMAPLEPEGS

SEQ ID NO: 2452 - protein, 95 aa, Thermosynechococcus elongatus
ASVVPQERQQVARKHYPNYKVIALNDDFNTFRHVAACLMKYIPNMTSDRAWELTNQVHYEGQAIVWVGPQEQAELDHEQLLRAGLTMAPLEPEGS

SEQ ID NO: 2453 - protein, 95 aa, Thermosynechococcus elongatus
ASVVPQERQQVARKHYPNYKVIAFNDDFNTFRHVAACLMKYIPNMTSDRAWELTNQVHYEGQAIVWVGPQVQAELYHEQLLRAGLTMAPLEPGGS

SEQ ID NO: 2454 - protein, 95 aa, Thermosynechococcus elongatus
ASVVPQERQQVARKHYPNYKVIGLNDDFNTFRHGAACLMKYIPNMTSDRAWELTNQVHYEGQAIVWVGPQEQAELYHEQLLRAGLTMAPLEPEGS

SEQ ID NO: 2455 - protein, 95 aa, Thermosynechococcus elongatus
ASVVPQERQQVARKHYPNYKVIGLNDDFNTFRHVAACLMKYIPNMTSDRAWELTNQGHYEGQAIVWVGPQVQAELYHEQVLRAGLTMAPLEPGGS

SEQ ID NO: 2456 - protein, 95 aa, Thermosynechococcus elongatus
ASVVPQERQQVARKHYPNYKVIGLNDDFNTFRHVAACLMKYIPNMTSDRAWELTNQVHYEGQAIVWVGPQVQAELYHEQLLRAGLTMAPLEPGGS

SEQ ID NO: 2457 - protein, 95 aa, Thermosynechococcus elongatus
ASVVPQERQQVARKHYPNYKVIGLNDDFNTFRHVAACLMKYIPNMTSDRAWELTNHVHSEGQAIVWVGPQVQAELDNEQLLRAGLTMAPLEPGGS

SEQ ID NO: 2458 - protein, 58 aa, Thermosynechococcus elongatus
ASVVPQERQQVARKHYPNYKVIVLNDDFNTIRHVAACLMKYIPNMTSDRAWELTNQVL

SEQ ID NO: 2459 - protein, 95 aa, Thermosynechococcus elongatus
ASVVPQERQQVARKHYPNYKVIVLNDDFNTFRHVAACLMKYIPNMTSDRAWELTNQVHYECQAIVWVGPLVQAELYHEQVLSAGLTMAPLEPGGS

SEQ ID NO: 2460 - protein, 95 aa, Thermosynechococcus elongatus; identical to SEQ ID NO: 3

SEQ ID NO: 2461 - protein, 77 aa, Thermosynechococcus elongatus
ASVVPQERQQVARKHYPNYKVIVLNDDFNTFRHVAACLMKYIPNMTSDRAWELTNQVHFEGQAIVWVGPQVQAELYH

SEQ ID NO: 2462 - protein, 81 aa, Thermosynechococcus elongatus
ASVVPQERQQVARKHYPNYKVIVLNDDFNTFRHVAACLMKYIPNMTSDRAWELTNQVHFVGQAIVWVGPQDQAEFYLDQLL

SEQ ID NO: 2463 - protein, 95 aa, Thermosynechococcus elongatus
ASVVPQERQQVARKHYPNYKVIVLNDDFNTFRHVAACWMKYIPNMTSDRAWELTNQVHYEGQAIVWVGPQVQAELYHEQLLRAGLTMAPVEPGGS

SEQ ID NO: 2464 - protein, 89 aa, Thermosynechococcus elongatus
ASVVPQERQQVARKHYPNYKVIVLNDDFNTFRHVAACLMKYIPNMTSDRAWELTNQGHYEGQAIVWVGPQVQAELYHDQLLRAGLTMAP

SEQ ID NO: 2465 - protein, 95 aa, Thermosynechococcus elongatus
ASVVPQERQQVARKHYPNYKVIVLNDDFNSFRHVAACVMKYIPNMTSDRAWELTNQVHYKAHAIVWVGPQEQAELHHEQLLRAGLTMAPLEPEGS

SEQ ID NO: 2466 - protein, 23 aa, Thermosynechococcus elongatus
ASVVPQERQQVARKHYPNYKVIV

SEQ ID NO: 2467 - protein, 95 aa, Thermosynechococcus elongatus
ASVVPQERQQVARKHYPNYKVIVSNDDFNTFRHVAACLMKYIPNKTSDRAWELTNQVHYEGQAIVWVGPQEQAELYHEQLLRAGLTMAPLEPEGS

SEQ ID NO: 2468 - protein, 95 aa, Thermosynechococcus elongatus
ASVVPQERQQVARKHYPNYKVIVSNDDFNTFRHVAACLMKYIPNMTSDRAWELTNQVHYEGQAIVWVGPQEQAELYHEQLLRAGLTMAPLEPEGS

SEQ ID NO: 2469 - protein, 95 aa, Thermosynechococcus elongatus
ASVVPQERQQVARKHYPNYKVIVSNDDFNTFRHVAACLMKYIPNMTSDRAWELTNQVHYEGQAIVWVGPQVQAELYHEQLLRAGLNMAPLEPGGS

SEQ ID NO: 2470 - protein, 95 aa, Thermosynechococcus elongatus
ASVVPQERQQVARKHYPNYKVIVWNDDFNTFRHVAACLMKYIPNMTSDRAWELTNQVHFEGQAIVWVGPQVQAELYLEHVLRAGLTRAPLEPEGS

SEQ ID NO: 2471 - protein, 37 aa, Thermosynechococcus elongatus
ASVVPQERQQVARKHYPNYKVIVLTTTSTLSDTLLHA

SEQ ID NO: 2472 - protein, 95 aa, Thermosynechococcus elongatus; identical to SEQ ID NO: 3

SEQ ID NO: 2473 - protein, 95 aa, Thermosynechococcus elongatus
ASVVPQERQQVARKHYPNYKVIVLKDDFNTFRHVAACLMKYIPNMTSDRAWELTNQVHYEGQAIVWVGPQEQAELYHEQLLRAGLTMAPLEPEGS

SEQ ID NO: 2474 - protein, 95 aa, Thermosynechococcus elongatus
ASVVPQERQQVARKHYPNYKVIVLKDDFNTFRHVAACLMKYIPNMTSDRAWELTNQVHFEGQAIVWVGPQEQAELYHEQLVRAGLTMAPLEPEGS

SEQ ID NO: 2475 - protein, 95 aa, Thermosynechococcus elongatus
ASVVPQERQQVARKHYPNYKVIVLKDDFNTFRHVVACLKKYIPNMISDRAWELTNQVHYGGRAIVWVGPQEQAELYHEQLLRAGLTMAPLEPEGS

SEQ ID NO: 2476 - protein, 80 aa, Thermosynechococcus elongatus
ASVVPQERQQVARKHYPNYKVIVLNYISNISSDRAWELTNQVHYEGQAIVWVGPQVQAELYHEQLLRAGLTMAPLEPGGS

SEQ ID NO: 2477 - protein, 95 aa, Thermosynechococcus elongatus
ASVVPQERQQVARKHYPNYKVIVLNNDFNTFRHVAACLMKYIPNMTSDRAWELTNQVHYEGQAIVWVGPQEQAELYHEQLLRAGLTMAPLEPEGS

SEQ ID NO: 2478 - protein, 95 aa, Thermosynechococcus elongatus
ASVVPQERQQVARKHYPNYKVIVLNDEFNTFRHVAACLKKYIPNMISDRAWELTNQVHYGGRAIVWVGPQEQAELYHEQLLRAGLTMAPLEPEGS

SEQ ID NO: 2479 - protein, 95 aa, Thermosynechococcus elongatus
ASVVPQERQQVARKHYPNYKVIVLNDDINTFQHVDACLKKYIPNMNSDRAWELTNQVHYGGRAIVWVGPQEQAELYHEQLLRAGLTMAPLEPEGS

SEQ ID NO: 2480 - protein, 95 aa, Thermosynechococcus elongatus
ASVVPQERQQVARKHYPNYKVIVLNDDINTFQHVVACLKKYIPNMISDRAWELTNQVHYGGRAIVWVGPQEQAELYHEQLLRAGLTMAPLEPEGS

SEQ ID NO: 2481 - protein, 95 aa, Thermosynechococcus elongatus
ASVVPQERQQVARKHYPNYKVIVLNDDYNTYQHVVACLKKYIPNMISDRAWELTNKVHYGGRAIVWVGPQEQAELYHEQLLRAGLTRAPLEPEGS

SEQ ID NO: 2482 - protein, 95 aa, Thermosynechococcus elongatus
ASVVPQERQQVARKHYPNYKVIVLNDDYNTYRHLAACLMKYIPNMTSDRAWELTNQVHYEGQAIVWVGPQEQAELYHKHLLRAGLTLAPLEPEGS

SEQ ID NO: 2483 - protein, 73 aa, Thermosynechococcus elongatus
ASVVPQERQQVARKHYPNYKVIVLNDDYNTFRHVAACLMKYIPNMTSDRSWELTNKVHYEGQAIVWVGPQLQA

SEQ ID NO: 2484 - protein, 95 aa, Thermosynechococcus elongatus
ASVVPQERQQVARKHYPNYKVIVLNDDYNTFRHVAACLMKYIPNMTSDRAWELTNQVHYEGQAIVWVGPQVQAELYHEQLLRAGLTMAPLEPGGS

SEQ ID NO: 2485 - protein, 95 aa, Thermosynechococcus elongatus
ASVVPQERQQVARKHYPNYKVIVLNDDSNTFRHVAACLMKYIPNMTSDRAWELTNQVHYEGQAIVWVGPQVQAELYHEQLLRAGLTMAPLEPEGS

SEQ ID NO: 2486 - protein, 95 aa, Thermosynechococcus elongatus; identical to SEQ ID NO: 649

SEQ ID NO: 2487 - protein, 95 aa, Thermosynechococcus elongatus
ASVVPQERQQVARKHYPNYKVIVLNDDLNTFRHVAACLMKYIPNMTSDRAWELTNQVHYGGRAIVWVGPQEQAELYHEQLLRAGLTMAPLEPEGS

SEQ ID NO: 2488 - protein, 95 aa, Thermosynechococcus elongatus
ASVVPQERQQVARKHYPNYKVIVLNDDFKTFQHVAACLMKYIPNMNSDRAWELTNQVHYEGQAIVLVGPQEQAELYHKQLLRAGLTMAPFEPEGS

SEQ ID NO: 2489 - protein, 95 aa, Thermosynechococcus elongatus
ASVVPQERQQVARKHYPNYKVIVLNDDFKTFRHVAACLMKYIPNKTSDRAWELTNQVHYEGQAIVWVGPQEQAELYHEHLLRAGLTMAPLEPEGS

SEQ ID NO: 2490 - protein, 95 aa, Thermosynechococcus elongatus; identical to SEQ ID NO: 6

SEQ ID NO: 2491 - protein, 95 aa, Thermosynechococcus elongatus; identical to SEQ ID NO: 3

SEQ ID NO: 2492 - protein, 95 aa, Thermosynechococcus elongatus; identical to SEQ ID NO: 9

SEQ ID NO: 2493 - protein, 95 aa, Thermosynechococcus elongatus; identical to SEQ ID NO: 3

SEQ ID NO: 2494 - protein, 95 aa, Thermosynechococcus elongatus; identical to SEQ ID NO: 38

SEQ ID NO: 2495 - protein, 95 aa, Thermosynechococcus elongatus
ASVVPQERQQVARKHYPNYKVIVLNDDFNTNRHVAACLMKYIPNMTSDRAWELTNQVHYEGQAIVWVGPQVQAELYHEQLLRAGLTMAPLEPGGS

SEQ ID NO: 2496 - protein, 70 aa, Thermosynechococcus elongatus
ASVVPQERQQVARKHYPNYKVIVLNDDFNTIRHDAACLMKYIPKMTSDRARELTNQVHYEGQAIDWVCPQ

SEQ ID NO: 2497 - protein, 95 aa, Thermosynechococcus elongatus
ASVVPQERQQVARKHYPNYKVIVLNDDFNTIQHVAACLMKYIPNMTSDRACELTNQVHFEGQAIVRVGPQEQAELYHNQLLRAGLTMAPLEPEGS

SEQ ID NO: 2498 - protein, 36 aa, Thermosynechococcus elongatus
ASVVPQERQQVARKHYPNYKVIVLNDDFNTIRHVAA

SEQ ID NO: 2499 - protein, 95 aa, Thermosynechococcus elongatus
ASVVPQERQQVARKHYPNYKVIVLNDDFNTIRHVAACLMKYIPNKTSDRAWELTNQVHYEGQAIVWVGPQEQAELYHEQLLRAGLTMAPLEPEGS

SEQ ID NO: 2500 - protein, 95 aa, Thermosynechococcus elongatus
ASVVPQERQQVARKHYPNYKVIVLNDDFNTIRHVAACLMKYIPNMTSDRAWELTNQVHYEGQAIVWVGPQEQAELYHEQLLRAGLTMAPLEPEGS

SEQ ID NO: 2501 - protein, 95 aa, Thermosynechococcus elongatus
ASVVPQERQQVARKHYPNYKVIVLNDDFNTIRHVAACLMKYIPNMTSDRAWELTNQVHYEGQAIVWVGPQVQAELYNEHLVRACLTMAPLEPEGS

SEQ ID NO: 2502 - protein, 95 aa, Thermosynechococcus elongatus
ASVVPQERQQVARKHYPNYKVIVLNDDFNTIRHVAACLMKYIPNMTSDRAWELTNQVHFEGLAIVWVGPQVQAELYHEQLLRAGLTMAPLEPGGS

SEQ ID NO: 2503 - protein, 95 aa, Thermosynechococcus elongatus
ASVVPQERQQVARKHYPNYKVIVLNDDFNTIRHVAACLMKYIPNMTSDRAWELTNQVLYKGQAIVWVGPQDQAELNHEQLLRAGLTMAPLEPEGS

SEQ ID NO: 2504 - protein, 95 aa, Thermosynechococcus elongatus; identical to SEQ ID NO: 1244

SEQ ID NO: 2505 - protein, 95 aa, Thermosynechococcus elongatus
ASVVPQERQQVARKHYPNYKVIVLNDDFNTLRHVAACLMKYIPNMTSDRAWELTNQVHYEGQAIVWVGPQVQAESYHEQLLRAGLTMAPLEPGGS

SEQ ID NO: 2506 - protein, 95 aa, Thermosynechococcus elongatus; identical to SEQ ID NO: 1244

SEQ ID NO: 2507 - protein, 95 aa, Thermosynechococcus elongatus
ASVVPQERQQVARKHYPNYKVIVLNDDFNTVRHVAACLMKYIPNMTSDRAWELTNQVHYEGQAIVWVGPQEQAELYHEQLLRAGLTMAPLEPEGS

SEQ ID NO: 2508 - protein, 52 aa, Thermosynechococcus elongatus
ASVVPQERQQVARKHYPNYKVIVLNDDFNTYRHDAACLMKYIPNMTSDRAWE

SEQ ID NO: 2509 - protein, 95 aa, Thermosynechococcus elongatus
ASVVPQERQQVARKHYPNYKVIVLNDDFNTYQHVVACLKKYIPNMISDRAWELTNQVHYGGRAIVWVGPQEQAELYHEQLLRAGLTMAPLEPEGS

SEQ ID NO: 2510 - protein, 95 aa, Thermosynechococcus elongatus
ASVVPQERQQVARKHYPNYKVIVLNDDFNTYRHDAACLMKYIPNMTSDRAWELTNQVHYEGQAIVWVGPQVQAELYHEQLLRAGLTMATLEPGGS

SEQ ID NO: 2511 - protein, 58 aa, Thermosynechococcus elongatus
ASVVPQERQQVARKHYPNYKVIVLNDDFNTYRHVAACLMKYITYMTSDRAWELTNQFH

SEQ ID NO: 2512 - protein, 95 aa, Thermosynechococcus elongatus
ASVVPQERQQVARKHYPNYKVIVLNDDFNTYRHVAACLMKYIPNMTSDRAWELTNQLHYEGLAIVWVGPQVQAELYPEQLLRAGLTMAPLEPEGS

SEQ ID NO: 2513 - protein, 95 aa, Thermosynechococcus elongatus
ASVVPQERQQVARKHYPNYKVIVLNDDFNTYRHVAACLMKYIPNMTSDRAWELTNQVHYEGQAIVWVGPQEQAELYHEQLLRAGLTMAPLEPEGS

SEQ ID NO: 2514 - protein, 95 aa, Thermosynechococcus elongatus
ASVVPQERQQVARKHYPNYKVIVLNDDFNTYRHVAACLMKYIPNMTSDRAWELTNQVHYEGQAIVWVGPQVQAELYHEQLLRAGLTMAPLEPEGS

SEQ ID NO: 2515 - protein, 95 aa, Thermosynechococcus elongatus
ASVVPQERQQVARKHYPNYKVIVLNDDFNTYRHVAACLMKYIPNMTSDRAWELTNQVHYEGLAIVWVGPQVQAELYPEQLLRVGLTMAPLEPEGS

SEQ ID NO: 2516 - protein, 95 aa, Thermosynechococcus elongatus
ASVVPQERQQVARKHYPNYKVIVLNDDFNTYRHVAACLMKYIPNMTSDRAWELTNQVHYVGQAIVWVGPQVQAELYHEQLLRAGLTMAPLEPGGS

SEQ ID NO: 2517 - protein, 95 aa, Thermosynechococcus elongatus
ASVVPQERQQVARKHYPNYKVIVLNDDFNTYRHVAACLMKYIPNMTSDRAWELTNQFHFEGLAIVCVCPQDQAELFHEHLLRAGLTMATLEPEGS

SEQ ID NO: 2518 - protein, 95 aa, Thermosynechococcus elongatus
ASVVPQERQQVARKHYPNYKVIVLNDDFNTSQHVVACLKKYIPNMISDRAWELTNQVHYGGRAIVWVGPQEQAELYHEQLLRAGLTMAPLEPEGS

SEQ ID NO: 2519 - protein, 95 aa, Thermosynechococcus elongatus
ASVVPQERQQVARKHYPNYKVIVLNDDFNTFRHDAACLMKYIPNMTSDRAWELTNQVHYEGLAIVWVGPQVQADLYHEHLLRAGLTMAPLDPGGS

SEQ ID NO: 2520 - protein, 52 aa, Thermosynechococcus elongatus
ASVVPQERQQVARKHYPNYKVIVLNDDFNTFRHVAACLMKYIPNMTSDRACE

SEQ ID NO: 2521 - protein, 95 aa, Thermosynechococcus elongatus
ASVVPQERQQVARKHYPNYKVIVLNDDFNTFRHVDACLMKYIPNMTSDRAWELTNQVHYEGQAIVWVGPQVQAELYHEQLLRAGLTMAPLEPGGS

SEQ ID NO: 2522 - protein, 36 aa, Thermosynechococcus elongatus; identical to SEQ ID NO: 518

SEQ ID NO: 2523 - protein, 36 aa, Thermosynechococcus elongatus; identical to SEQ ID NO: 518

SEQ ID NO: 2524 - protein, 36 aa, Thermosynechococcus elongatus; identical to SEQ ID NO: 518

SEQ ID NO: 2525 - protein, 95 aa, Thermosynechococcus elongatus
ASVVPQERQQVARKHYPNYKVIVLNDDFNTFRHVAACLMKYIPNMTSDRAWELTNQVHYQGQAIVWVGPQVQAELYHEQLLRAGLTMAPFEPEGS

SEQ ID NO: 2526 - protein, 95 aa, Thermosynechococcus elongatus; identical to SEQ ID NO: 6

SEQ ID NO: 2527 - protein, 95 aa, Thermosynechococcus elongatus; identical to SEQ ID NO: 1297

SEQ ID NO: 2528 - protein, 95 aa, Thermosynechococcus elongatus; identical to SEQ ID NO: 389

SEQ ID NO: 2529 - protein, 95 aa, Thermosynechococcus elongatus
ASVVPQERQQVARKHYPNYKVIVLNDDFNTFRHVAACLMKYIPNITSDRAWELTNQVHYEGQAIVWVGPQVQAELNHEQLLRAGLTMAPLEPEGS

SEQ ID NO: 2530 - protein, 95 aa, Thermosynechococcus elongatus
ASVVPQERQQVARKHYPNYKVIVLNDDFNTFQHDVACLKKYIPNMISDRAWELTNQVHYGGRAIVWVGPQEQAELYHEQLLRAGLTMAPLEPGGS

SEQ ID NO: 2531 - protein, 95 aa, Thermosynechococcus elongatus
ASVVPQERQQVARKHYPNYKVIVLNDDFNTFQHVAACLMKYIPNMTSDRAWELTIQVHYEGQAIVWVGPQEQAELYHEQLLRAGLTMAPLEPEGS

SEQ ID NO: 2532 - protein, 95 aa, Thermosynechococcus elongatus
ASVVPQERQQVARKHYPNYKVIVLNDDFNTFQHVAACLMKYIPNMTSDRAWELTNQVHYEGQAIVQVGPQEQAELYHEQLLRAGLTMAPLEPEGS

SEQ ID NO: 2533 - protein, 95 aa, Thermosynechococcus elongatus; identical to SEQ ID NO: 447

SEQ ID NO: 2534 - protein, 95 aa, Thermosynechococcus elongatus
ASVVPQERQQVARKHYPNYKVIVLNDDFNTFQHVAACLMKYIPNMTSDRAWELTNQVHYEGQAIVWVGPQEQAELYHEQLLRTGLTMAPLEPEGS

SEQ ID NO: 2535 - protein, 95 aa, Thermosynechococcus elongatus; identical to SEQ ID NO: 222

SEQ ID NO: 2536 - protein, 95 aa, Thermosynechococcus elongatus; identical to SEQ ID NO: 1811

SEQ ID NO: 2537 - protein, 95 aa, Thermosynechococcus elongatus
ASVVPQERQQVARKHYPNYKVIVLNDDFNTFQHVAACLMKYIPNMTSDRAWELTNQVHYEGRAIVWVGPQEQAELYHEQLLRAGLTMAPLEPEGS

SEQ ID NO: 2538 - protein, 95 aa, Thermosynechococcus elongatus; identical to SEQ ID NO: 358

SEQ ID NO: 2539 - protein, 95 aa, Thermosynechococcus elongatus; identical to SEQ ID NO: 36

SEQ ID NO: 2540 - protein, 95 aa, Thermosynechococcus elongatus; identical to SEQ ID NO: 104

SEQ ID NO: 2541 - protein, 77 aa, Thermosynechococcus elongatus
ASVVPQERQQVARKHYPNYKVIVLNDDFNTFQHVAACLMKYIPNMTSDRAWELTNQVHYVGQAIVWVGPQEQAELYH

SEQ ID NO: 2542 - protein, 95 aa, Thermosynechococcus elongatus
ASVVPQERQQVARKHYPNYKVIVLNDDFNTFQHVAACLMKYIPNMTSDRAWELTNQVHYKGQATVWVGPQKQAELYHEQLLRAGLTMAPLEPEGS

SEQ ID NO: 2543 - protein, 95 aa, Thermosynechococcus elongatus; identical to SEQ ID NO: 783

SEQ ID NO: 2544 - protein, 95 aa, Thermosynechococcus elongatus
ASVVPQERQQVARKHYPNYKVIVLNDDFNTFQHVVECLKKYIPNMISDRAWELTNQVHYGGRAIVWVGPQEQAELYHEQLLRAGLTMAPLEPEGS

SEQ ID NO: 2545 - protein, 95 aa, Thermosynechococcus elongatus
ASVVPQERQQVARKHYPNYKVIVLNDDFNTFQHVVASLKKYIPNMISDRAWELTNQVHYGGRAIVWVGPQEQAELYHEQLLRAGLTMAPLEPEGS

SEQ ID NO: 2546 - protein, 36 aa, Thermosynechococcus elongatus
ASVVPQERQQVARKHYPNYKVIVLNDDFNTFQHVVA

SEQ ID NO: 2547 - protein, 95 aa, Thermosynechococcus elongatus
ASVVPQERQQVARKHYPNYKVIVLNDDFNTFQHVVACVKKYIPNMISDRAWELTNQVHYGGRAIVWVGPQEQAELYHEQLLRAGLTMAPLEPEGS

SEQ ID NO: 2548 - protein, 44 aa, Thermosynechococcus elongatus
ASVVPQERQQVARKHYPNYKVIVLNDDFNTFQHVVACLKKYIQT

SEQ ID NO: 2549 - protein, 95 aa, Thermosynechococcus elongatus
ASVVPQERQQVARKHYPNYKVIVLNDDFNTFQHVVACLKKYIPNKTSDRAWELTNQVHHEGQAIVWVGPQEQAELYHEQLLRAGLTMAPLEPEGS

SEQ ID NO: 2550 - protein, 95 aa, Thermosynechococcus elongatus
ASVVPQERQQVARKHYPNYKVIVLNDDFNTFQHVVACLKKYIPNMTSDRAWELTNQVHYEGQAIVWVGPQEQAELYHEQLLRAGLTMAPLEPEGS

SEQ ID NO: 2551 - protein, 95 aa, Thermosynechococcus elongatus
ASVVPQERQQVARKHYPNYKVIVLNDDFNTFQHVVACLKKYIPNMTSDRAWELTNQVHYEGQAIVWVGPQVQAELYHEQLLRAGLTMAPLEPEGS

SEQ ID NO: 2552 - protein, 95 aa, Thermosynechococcus elongatus
ASVVPQERQQVARKHYPNYKVIVLNDDFNTFQHVVACLKKYIPNMTSDRAWELTNQVHYEGQAIVWVGPREQAELYHEQLLRVGLTMAPLEPEGS

SEQ ID NO: 2553 - protein, 95 aa, Thermosynechococcus elongatus
ASVVPQERQQVARKHYPNYKVIVLNDDFNTFQHVVACLKKYIPNMTSDRAWELTNQVHYGGRAIVWVGPQEQAELYHEQLLRAGLTMAPLEPEGS

SEQ ID NO: 2554 - protein, 95 aa, Thermosynechococcus elongatus
ASVVPQERQQVARKHYPNYKVIVLNDDFNTFQHVVACLKKYIPNMSSDRAWELTNQVHYGGRAIVWVGPQEQAELYHEQLLRAGLTMAPLEPEGS

SEQ ID NO: 2555 - protein, 95 aa, Thermosynechococcus elongatus
ASVVPQERQQVARKHYPNYKVIVLNDDFNTFQHVVACLKKYIPNMISDRAWELNNQVHYGGRAIVWVGPQEQAELYHEQLLRAGLTMAPLEPEGS

SEQ ID NO: 2556 - protein, 95 aa, Thermosynechococcus elongatus
ASVVPQERQQVARKHYPNYKVIVLNDDFNTFQHVVACLKKYIPNMISDRAWELTNQLHYRGRAIVWVGPQEQAELYHEQLLRAGLTMAPLEPEGS

SEQ ID NO: 2557 - protein, 95 aa, Thermosynechococcus elongatus
ASVVPQERQQVARKHYPNYKVIVLNDDFNTFQHVVACLKKYIPNMISDRAWELTNQGHYGGRAIVWVGPQEQAELYHEQLLRAGLTMAPLEPEGS

SEQ ID NO: 2558 - protein, 95 aa, Thermosynechococcus elongatus
ASVVPQERQQVARKHYPNYKVIVLNDDFNTFQHVVACLKKYIPNMISDRAWELTNQVHYKGQAIVWVGPQEQAELNHEQLLRAGLTMAPLEPEGS

SEQ ID NO: 2559 - protein, 95 aa, Thermosynechococcus elongatus
ASVVPQERQQVARKHYPNYKVIVLNDDFNTFQHVVACLKKYIPNMISDRAWELTNQVHYEGQAIVRVGPQEQAELYHKQLLRAGLTMAPLEPEGS

SEQ ID NO: 2560 - protein, 95 aa, Thermosynechococcus elongatus
ASVVPQERQQVARKHYPNYKVIVLNDDFNTFQHVVACLKKYIPNMISDRAWELTNQVHYEGQAIVWVGPQEQAELYHEQLLRTGLTMAPLEPEGS

SEQ ID NO: 2561 - protein, 95 aa, Thermosynechococcus elongatus
ASVVPQERQQVARKHYPNYKVIVLNDDFNTFQHVVACLKKYIPNMISDRAWELTNQVHYECQAIVWVGPQEQAELYHEQLLRAGLTMAPLEPEGS

SEQ ID NO: 2562 - protein, 95 aa, Thermosynechococcus elongatus
ASVVPQERQQVARKHYPNYKVIVLNDDFNTFQHVVACLKKYIPNMISDRAWELTNQVHYGDRAIVWVGPQEQAELYHEQLLRAGLTMAPLEPEGS

SEQ ID NO: 2563 - protein, 95 aa, Thermosynechococcus elongatus
ASVVPQERQQVARKHYPNYKVIVLNDDFNTFQHVVACLKKYIPNMISDRAWELTNQVHYGGQAIVWVGPQEQAELNHEQLLRAGLTMAPLEPEGS

SEQ ID NO: 2564 - protein, 95 aa, Thermosynechococcus elongatus; identical to SEQ ID NO: 861

SEQ ID NO: 2565 - protein, 95 aa, Thermosynechococcus elongatus; identical to SEQ ID NO: 652

SEQ ID NO: 2566 - protein, 95 aa, Thermosynechococcus elongatus
ASVVPQERQQVARKHYPNYKVIVLNDDFNTFQHVVACLKKYIPNMISDRAWELTNQVHYGGRAIVWAGPQEQAELYHEQLLRAGLTMAPLEPEGS

SEQ ID NO: 2567 - protein, 95 aa, Thermosynechococcus elongatus
ASVVPQERQQVARKHYPNYKVIVLNDDFNTFQHVVACLKKYIPNMISDRAWELTNQVHYGGRAIVWVGPQEQAELYHEKLLRAGLTMAPLEPEGS

SEQ ID NO: 2568 - protein, 95 aa, Thermosynechococcus elongatus; identical to SEQ ID NO: 19

SEQ ID NO: 2569 - protein, 95 aa, Thermosynechococcus elongatus
ASVVPQERQQVARKHYPNYKVIVLNDDFNTFQHVVACLKKYIPNMISDRAWELTNQVHYGGRAIVWVGPQEQAELYHEQLWRAGLTMAPLEPEGS

SEQ ID NO: 2570 - protein, 95 aa, Thermosynechococcus elongatus
ASVVPQERQQVARKHYPNYKVIVLNDDFNTFQHVVACLKKYIPNMISDRAWELTNQVHYGGRAIVWVGPQEQAELYHEQLLRTGLTMAPLEPEGS

SEQ ID NO: 2571 - protein, 95 aa, Thermosynechococcus elongatus; identical to SEQ ID NO: 19

SEQ ID NO: 2572 - protein, 95 aa, Thermosynechococcus elongatus
ASVVPQERQQVARKHYPNYKVIVLNDDFNTFQHVVACLKKYIPNMISDRAWELTNQVHYGGRAIVWVGPQEQAELYHEQLLRAGLTMATLEPEGS

SEQ ID NO: 2573 - protein, 95 aa, Thermosynechococcus elongatus
ASVVPQERQQVARKHYPNYKVIVLNDDFNTFQHVVACLKKYIPNMISDRAWELTNQVHYGGRAIVWVGPQEQAELYHEQLLRAGLTMAPLEPKGS

SEQ ID NO: 2574 - protein, 95 aa, Thermosynechococcus elongatus
ASVVPQERQQVARKHYPNYKVIVLNDDFNTFQHVVACLKKYIPNMISDRAWELTNQVHYGGRAIVWVGPQEQAELYHEQLLRAGLTIAPLEPEGS

SEQ ID NO: 2575 - protein, 95 aa, Thermosynechococcus elongatus
ASVVPQERQQVARKHYPNYKVIVLNDDFNTFQHVVACLKKYIPNMISDRAWELTNQVHYGGRAIVWVGPQEQAELYHEQLLRAVLTMAPLEPEGS

SEQ ID NO: 2576 - protein, 95 aa, Thermosynechococcus elongatus
ASVVPQERQQVARKHYPNYKVIVLNDDFNTFQHVVACLKKYIPNMISDRAWELTNQVHYGGRAIVWVGPQEQAELYHEQLLRGGLTMAPLEPEGS

SEQ ID NO: 2577 - protein, 95 aa, Thermosynechococcus elongatus
ASVVPQERQQVARKHYPNYKVIVLNDDFNTFQHVVACLKKYIPNMISDRAWELTNQVHYGGRAIVWVGPQEQAELYHEHLLRAGLTMAPLEPEGS

SEQ ID NO: 2578 - protein, 95 aa, Thermosynechococcus elongatus
ASVVPQERQQVARKHYPNYKVIVLNDDFNTFQHVVACLKKYIPNMISDRAWELTNQVHYGGRAIVWVGPQEQAELYQEQLLRAGLTMAPLEPEGS

SEQ ID NO: 2579 - protein, 95 aa, Thermosynechococcus elongatus; identical to SEQ ID NO: 385

SEQ ID NO: 2580 - protein, 95 aa, Thermosynechococcus elongatus
ASVVPQERQQVARKHYPNYKVIVLNDDFNTFQHVVACLKKYIPNMISDRAWELTNQVHYGGRAIVWVGPQEQAELCHEQLLRAGLTMAPLEPEGS

SEQ ID NO: 2581 - protein, 95 aa, Thermosynechococcus elongatus
ASVVPQERQQVARKHYPNYKVIVLNDDFNTFQHVVACLKKYIPNMISDRAWELTNQVHYGGRAIVWVGPQEPAELYHEQLLRAGLTMAPLEPEGS

SEQ ID NO: 2582 - protein, 95 aa, Thermosynechococcus elongatus
ASVVPQERQQVARKHYPNYKVIVLNDDFNTFQHVVACLKKYIPNMISDRAWELTNQVHYGGRAIVWVGPQERAELYHEQLLRAGLTMAPLEPEGS

SEQ ID NO: 2583 - protein, 95 aa, Thermosynechococcus elongatus
ASVVPQERQQVARKHYPNYKVIVLNDDFNTFQHVVACLKKYIPNMISDRAWELTNQVHYGGRAIVWVGPQVQAELNHEQLLRAGLTMAPLEPEGS

SEQ ID NO: 2584 - protein, 95 aa, Thermosynechococcus elongatus
ASVVPQERQQVARKHYPNYKVIVLNDDFNTFQHVVACLKKYIPNMISDRAWELTNQVHYGGRAIVWVGPQVQAELYHEQLLRAGLTMAPLEPEGS

SEQ ID NO: 2585 - protein, 69 aa, Thermosynechococcus elongatus
ASVVPQERQQVARKHYPNYKVIVLNDDFNTFQHVVACLKKYIPNMISDRAWELTNQVHYGGRAIVWVGP

SEQ ID NO: 2586 - protein, 95 aa, Thermosynechococcus elongatus
ASVVPQERQQVARKHYPNYKVIVLNDDFNTFQHVVACLKKYIPNMISDRAWELTNQVHYGGRAIVWVVPQEQAELYHEQLLRAGLTMAPLEPEGS

SEQ ID NO: 2587 - protein, 95 aa, Thermosynechococcus elongatus
ASVVPQERQQVARKHYPNYKVIVLNDDFNTFQHVVACLKKYIPNMISDRAWELTNQVHYGGRALVWVGPQEQAELYHEQLLRAGLTRAPLEPEGS

SEQ ID NO: 2588 - protein, 95 aa, Thermosynechococcus elongatus; identical to SEQ ID NO: 19

SEQ ID NO: 2589 - protein, 95 aa, Thermosynechococcus elongatus
ASVVPQERQQVARKHYPNYKVIVLNDDFNTFQHVVACLKKYIPNMISDRAWELTNQVYYGGRAIVWVGPQEQAELYHEQLLRAGLTMAPLEPEGS

SEQ ID NO: 2590 - protein, 95 aa, Thermosynechococcus elongatus
ASVVPQERQQVARKHYPNYKVIVLNDDFNTFQHVVACLKKYIPNMISDRAWELTNHVHYGGRAIVWVGPQEQAELYHEQLLRAGLTMAPLEPEGS

SEQ ID NO: 2591 - protein, 95 aa, Thermosynechococcus elongatus
ASVVPQERQQVARKHYPNYKVIVLNDDFNTFQHVVACLKKYIPNMISDRAWELTNEVHYGGRAIVWVGPQEQAELYHEQLLRAGLTMAPLEPEGS

SEQ ID NO: 2592 - protein, 95 aa, Thermosynechococcus elongatus
ASVVPQERQQVARKHYPNYKVIVLNDDFNTFQHVVACLKKYIPKMISDRAWELTNQVHYGGRAIVWVGPQEQAELYHEQLLRAGLTMAPLEPEGS

SEQ ID NO: 2593 - protein, 95 aa, Thermosynechococcus elongatus
ASVVPQERQQVARKHYPNYKVIVLNDDFNTFQHVVACLKEYIPNMISDRAWELTNQVHYGGRAIVWVGPQEQAELYHEQLLRAGLTMAPLEPEGS

SEQ ID NO: 2594 - protein, 95 aa, Thermosynechococcus elongatus
ASVVPQERQQVARKHYPNYKVIVLNDDFNTFQHVVACLMKYIPNKTSDRAWELTNQVHYEGQAIVWVGPQVQAELYHEQLLRAGLTMAPLEPGGS

SEQ ID NO: 2595 - protein, 95 aa, Thermosynechococcus elongatus
ASVVPQERQQVARKHYPNYKVIVLNDDFNTFQHVVACLMKYIPNMTSDRAWELTNQVHYEGQAIVWVGPQEQAELYHEQLLRTGLTMAPLEPEGS

SEQ ID NO: 2596 - protein, 95 aa, Thermosynechococcus elongatus; identical to SEQ ID NO: 1254

SEQ ID NO: 2597 - protein, 95 aa, Thermosynechococcus elongatus
ASVVPQERQQVARKHYPNYKVIVLNDDFNTFQHVVACLMKYIPNMTSDRAWELTNQVHYEGQAIVWVGPQVQAELYHEQLLRAGLTMAPLEPEGS

SEQ ID NO: 2598 - protein, 95 aa, Thermosynechococcus elongatus
ASVVPQERQQVARKHYPNYKVIVLNDDFNTFQHVVACLMKYIPNMTSDRAWELTNQVHYVGQAIVWVGPQEQAELYHEQLLRAGLTMAPLEPEGS

SEQ ID NO: 2599 - protein, 95 aa, Thermosynechococcus elongatus
ASVVPQERQQVARKHYPNYKVIVLNDDFNTFRHLAACLMKYIPNMTSDRAWELTNQVHYEGQAIVWVGPQVQAELYHEQLLRAGLTMAPLEPEGS

SEQ ID NO: 2600 - protein, 95 aa, Thermosynechococcus elongatus
ASVVPQERQQVARKHYPNYKVIVLNDDFNTFRHLAACLMKYIPNMTSDRAWELTNQVHYEGQAIVWVGPQVQAELYHEQLLRAGLTMAPLEPGGS

SEQ ID NO: 2601 - protein, 36 aa, Thermosynechococcus elongatus
ASVVPQERQQVARKHYPNYKVIVLNDDFNTFRHDAA

SEQ ID NO: 2602 - protein, 95 aa, Thermosynechococcus elongatus
ASVVPQERQQVARKHYPNYKVIVLNDDFNTFRHDAACLMKYIPNMTSDRAWELTNQVHYEGQAIVWVGPQVQAELYHEQLLRAGLTMAPLEPEGS

SEQ ID NO: 2603 - protein, 75 aa, Thermosynechococcus elongatus
ASVVPQERQQVARKHYPNYKVIVLNDDFNTFRHDAACLMKYIPNMTSDRAWELTNQVHYEGQAIVWVGPQVQAEL

SEQ ID NO: 2604 - protein, 95 aa, Thermosynechococcus elongatus
ASVVPQERQQVARKHYPNYKVIVLNDDFNTFRHDAACLMKYIPNMTSDRAWELTNQVHYEGQAIVLVGPLVQAELYHEQLLRAGLTMAPLEPGGS

SEQ ID NO: 2605 - protein, 95 aa, Thermosynechococcus elongatus
ASVVPQERQQVARKHYPNYKVIVLNDDFNTFRHDAACLMKYIPNMTSDRAWELTNQVLYEGQAIVWVGPQVQAELYHEQLLRAGLTMAPLEPGGS

SEQ ID NO: 2606 - protein, 95 aa, Thermosynechococcus elongatus; identical to SEQ ID NO: 1256

SEQ ID NO: 2607 - protein, 95 aa, Thermosynechococcus elongatus
ASVVPQERQQVARKHYPNYKVIVLNDDFNTFRHDAACLMKYIPNMISDRAWELTNQVHYGGRAIVWVGPQEQAELYHEQLLRAGLTMAPLEPEGS

SEQ ID NO: 2608 - protein, 95 aa, Thermosynechococcus elongatus
ASVVPQERQQVARKHYPNYKVIVLNDDFNTFRHGAACLMKYIPNMTSDRAWELTNQVHYEGQAIVWVGPQEQAELYHEQLLRAGLTMAPLEPEGS

SEQ ID NO: 2609 - protein, 95 aa, Thermosynechococcus elongatus
ASVVPQERQQVARKHYPNYKVIVLNDDFNTFRHGAACLMKYIPNMTSDRAWELTNQVHYEGQAIVWVGPQVQAELDHEQLLRAGLTMAPLEPGGS

SEQ ID NO: 2610 - protein, 95 aa, Thermosynechococcus elongatus; identical to SEQ ID NO: 3

SEQ ID NO: 2611 - protein, 95 aa, Thermosynechococcus elongatus; identical to SEQ ID NO: 166

SEQ ID NO: 2612 - protein, 95 aa, Thermosynechococcus elongatus; identical to SEQ ID NO: 195

SEQ ID NO: 2613 - protein, 95 aa, Thermosynechococcus elongatus
ASVVPQERQQVARKHYPNYKVIVLNDDFNTFRHVAACLMKYIPIMTSDRAWELTNQVHYEGQAIVWVGPQVQAELYHEHLLRAGLTRAPLEPGGS

SEQ ID NO: 2614 - protein, 36 aa, Thermosynechococcus elongatus
ASVVPQERQQVARKHYPNYKVIVLNDDFNTFRHVDA

SEQ ID NO: 2615 - protein, 36 aa, Thermosynechococcus elongatus; identical to SEQ ID NO: 2614

SEQ ID NO: 2616 - protein, 40 aa, Thermosynechococcus elongatus
ASVVPQERQQVARKHYPNYKVIVLNDDFNTFRHVDACLMK

SEQ ID NO: 2617 - protein, 95 aa, Thermosynechococcus elongatus; identical to SEQ ID NO: 2521

SEQ ID NO: 2618 - protein, 95 aa, Thermosynechococcus elongatus
ASVVPQERQQVARKHYPNYKVIVLNDDFNTFRHVDACLMKYIPNMTSDRAWELTNQVHYGGRAIVWVGPQEQAELYHEQLLRAGLTMAPLEPEGS

SEQ ID NO: 2619 - protein, 95 aa, Thermosynechococcus elongatus
ASVVPQERQQVARKHYPNYKVIVLNDDFNTFRHVDACLMKYIPNMSSDRAWELTNQVHYGGLAIVWVGPQVQAELYHEQLLRAGLTMAPLEPVGS

SEQ ID NO: 2620 - protein, 95 aa, Thermosynechococcus elongatus
ASVVPQERQQVARKHYPNYKVIVLNDDFNTFRHVDACLMKYIPNMISDRAWELTNQVHYGGRAIVWVGPQEQAELYHEQLLRAGLTMAPLEPEGS

SEQ ID NO: 2621 - protein, 95 aa, Thermosynechococcus elongatus; identical to SEQ ID NO: 3

SEQ ID NO: 2622 - protein, 95 aa, Thermosynechococcus elongatus; identical to SEQ ID NO: 3

SEQ ID NO: 2623 - protein, 95 aa, Thermosynechococcus elongatus
ASVVPQERQQVARKHYPNYKVIVLNDDFNTFRHVAACMMKYIPTMTSDRAWELTNQVHYEGQAIVWVGPQVQAELYHEQLLRAGLTMAPLEPGGS

SEQ ID NO: 2624 - protein, 95 aa, Thermosynechococcus elongatus
ASVVPQERQQVARKHYPNYKVIVLNDDFNTFRHVAASLMKYIPNMTSDRAWYLTNQVHFEGEAIVWVGPLLQAELFLEILLSAGLTMAPLDPVGS

SEQ ID NO: 2625 - protein, 95 aa, Thermosynechococcus elongatus
ASVVPQERQQVARKHYPNYKVIVLNDDFNTFRHVAASLMKYIPNMTSDRAWELTNQVHYKGQAIVWVGPQEQAELNHEQLLRAGLTMAPLEPEGS

SEQ ID NO: 2626 - protein, 95 aa, Thermosynechococcus elongatus
ASVVPQERQQVARKHYPNYKVIVLNDDFNTFRHVAAYLMKYIPNMTSDRAWELTNQVHYEGQAIVWVGPQVQAELYHEQLLRAGLTMAPLEPGGS

SEQ ID NO: 2627 - protein, 95 aa, Thermosynechococcus elongatus
ASVVPQERQQVARKHYPNYKVIVLNDDFNTFRHVAASLMKYIPNMTSDRAWELTNQVHYEGQAIVWVGPQVQAELYHEQLLRAGLTMAPLEPEGS

SEQ ID NO: 2628 - protein, 36 aa, Thermosynechococcus elongatus; identical to SEQ ID NO: 518

SEQ ID NO: 2629 - protein, 36 aa, Thermosynechococcus elongatus; identical to SEQ ID NO: 518

SEQ ID NO: 2630 - protein, 95 aa, Thermosynechococcus elongatus
ASVVPQERQQVARKHYPNYKVIVLNDDFNTFRHVAACMMKYIPNMTSDRAWELTNQVHYEGQAIVWVGPQEQAELNHEQLLRAGLTMAPLEPEGS

SEQ ID NO: 2631 - protein, 95 aa, Thermosynechococcus elongatus; identical to SEQ ID NO: 21

SEQ ID NO: 2632 - protein, 95 aa, Thermosynechococcus elongatus
ASVVPQERQQVARKHYPNYKVIVLNDDFNTFRHVAACSMKYIPNMTSDRAWELTNQVHYEGQAIVWVGPQVQAELYHEQLLRAGLTMAPLEPEGS

SEQ ID NO: 2633 - protein, 95 aa, Thermosynechococcus elongatus
ASVVPQERQQVARKHYPNYKVIVLNDDFNTFRHVAACWMKYIPNKTSDRAWELTNQVHYEGQAIVWVGPQEQAELYHEQLLRAGLTMAPLEPEGS

SEQ ID NO: 2634 - protein, 95 aa, Thermosynechococcus elongatus
ASVVPQERQQVARKHYPNYKVIVLNDDFNTFRHVAACFMKYIPNMTSDRAWELTNQVHYEGLAIVWVGPQDQAELYHEQLLRAGLTMAPLDPEGS

SEQ ID NO: 2635 - protein, 95 aa, Thermosynechococcus elongatus
ASVVPQERQQVARKHYPNYKVIVLNDDFNTFRHVAACLKKYIPNKTSDRAWELTNQVHYEGQAIVWVGPQEQAELYHEQLLRAGLTMAPLEPEGS

SEQ ID NO: 2636 - protein, 95 aa, Thermosynechococcus elongatus
ASVVPQERQQVARKHYPNYKVIVLNDDFNTFRHVAACLKKYIPNMTSDRAWELTNQVHYKGQAIVWVGPQEQAELNHEQLLRAGLTMAPLEPEGS

SEQ ID NO: 2637 - protein, 95 aa, Thermosynechococcus elongatus
ASVVPQERQQVARKHYPNYKVIVLNDDFNTFRHVAACLKKYIPNMISDRAWELTNQVQYGGRAIVWVGPQELAELYHELLLRAGLTMAPLEPVGS

SEQ ID NO: 2638 - protein, 95 aa, Thermosynechococcus elongatus
ASVVPQERQQVARKHYPNYKVIVLNDDFNTFRHVAACLKKYIPNMISDRAWELTNQVHYKGQAIVWVGPQEQAELNHEQLLRAGLTMAPLEPEGS

SEQ ID NO: 2639 - protein, 95 aa, Thermosynechococcus elongatus
ASVVPQERQQVARKHYPNYKVIVLNDDFNTFRHVAACLKKYIPNMISDRAWELTNQVHYEGQAIVWVGPQVQAELYHEQLLRAGLTMAPLEPGGS

SEQ ID NO: 2640 - protein, 95 aa, Thermosynechococcus elongatus
ASVVPQERQQVARKHYPNYKVIVLNDDFNTFRHVAACLKKYIPNMISDRAWELTNQVHYGGQAIVWVGPQEQAELYHEQLLRAGLTMAPLEPEGS

SEQ ID NO: 2641 - protein, 95 aa, Thermosynechococcus elongatus
ASVVPQERQQVARKHYPNYKVIVLNDDFNTFRHVAACLKKYIPNMISDRAWELTNQVHYGGRAIVRVGPQEQAELYHEQLLRAGLTMAPLEPEGS

SEQ ID NO: 2642 - protein, 95 aa, Thermosynechococcus elongatus
ASVVPQERQQVARKHYPNYKVIVLNDDFNTFRHVAACLKKYIPNMISDRAWELTNQVHYGGRAIVWVGPQEQAELNHEQLLRAGLTMAPLEPEGS

SEQ ID NO: 2643 - protein, 95 aa, Thermosynechococcus elongatus; identical to SEQ ID NO: 870

SEQ ID NO: 2644 - protein, 92 aa, Thermosynechococcus elongatus
ASVVPQERQQVARKHYPNYKVIVLNDDFNTFRHVAACLKKYIPNMISDRAWELTNQVHYGGRAIVWVGPQEQAELYHEQLLRAGLTMAPLEP

SEQ ID NO: 2645 - protein, 95 aa, Thermosynechococcus elongatus
ASVVPQERQQVARKHYPNYKVIVLNDDFNTFRHVAACLKKYIPNMISDRAWELTNQVHYGGRAIVCVGPQEQAELYHEQLLRAGLTMAPLEPEGS

SEQ ID NO: 2646 - protein, 95 aa, Thermosynechococcus elongatus
ASVVPQERQQVARKHYPNYKVIVLNDDFNTFRHVAACLKKYIPNMISDRAWELTNQVHYGGRAIVLVGPQEQAELYHEQLLRAGLTMAPLEPEGS

SEQ ID NO: 2647 - protein, 59 aa, Thermosynechococcus elongatus
ASVVPQERQQVARKHYPNYKVIVLNDDFNTFRHVAACLKKYIPNMISDRAWELTNQVHY

SEQ ID NO: 2648 - protein, 95 aa, Thermosynechococcus elongatus
ASVVPQERQQVARKHYPNYKVIVLNDDFNTFRHVAACLKKYIPNMISDRAWELTNQVHFGGRAIVWVGPQEQAELYHEQLLRAGLTMAPLEPEGS

SEQ ID NO: 2649 - protein, 95 aa, Thermosynechococcus elongatus
ASVVPQERQQVARKHYPNYKVIVLNDDFNTFRHVAACLKKYIANMISDRAWELTNQVHYEGQAIVWVGPQEQAELYHEQLLRAGLTMAQLEPEGS

SEQ ID NO: 2650 - protein, 95 aa, Thermosynechococcus elongatus
ASVVPQERQQVARKHYPNYKVIVLNDDFNTFRHVAACLTKYIPNMTSDRAWELTNQVHYEGQAIVWVGPQVQAELYHEQLLRAGLTMAPLEPEGS

SEQ ID NO: 2651 - protein, 95 aa, Thermosynechococcus elongatus
ASVVPQERQQVARKHYPNYKVIVLNDDFNTFRHVAACLIKYIPNIISDRAWELTNQVHYGGRAIVWVGPQEQAELYHEQLLRAGLTMAPLEPGGS

SEQ ID NO: 2652 - protein, 95 aa, Thermosynechococcus elongatus
ASVVPQERQQVARKHYPNYKVIVLNDDFNTFRHVAACLIKYIPNMTSDRAWELTNQVHYEGQAIVWVGPQVQAELYHEQLLRAGLTMAPLEPGGS

SEQ ID NO: 2653 - protein, 95 aa, Thermosynechococcus elongatus
ASVVPQERQQVARKHYPNYKVIVLNDDFNTFRHVAACLMNYIPNMTSDRAWELTNQVHYEGQAIVWVGPQVQAELYHEQLLRAGLTMAPLEPGGS

SEQ ID NO: 2654 - protein, 95 aa, Thermosynechococcus elongatus
ASVVPQERQQVARKHYPNYKVIVLNDDFNTFRHVAACLMKNIPNMTSDRAWELTNQVHYEGQAIVWVGPQEQAELYHEQLLRAGLTMAPLEPEGS

SEQ ID NO: 2655 - protein, 95 aa, Thermosynechococcus elongatus
ASVVPQERQQVARKHYPNYKVIVLNDDFNTFRHVAACLMKHIPNMTSDRAWELTNQVHYEGQAIVWVGPQVQAELYHEQLLRAGLTMAPLEPGGS

SEQ ID NO: 2656 - protein, 95 aa, Thermosynechococcus elongatus
ASVVPQERQQVARKHYPNYKVIVLNDDFNTFRHVAACLMKDIPNMTSDRAWELTNLVHYEGQAIVCVGPQVQAELYHEQLLRAGLTLAPLEPGGS

SEQ ID NO: 2657 - protein, 40 aa, Thermosynechococcus elongatus
ASVVPQERQQVARKHYPNYKVIVLNDDFNTFRHVAACLMK

SEQ ID NO: 2658 - protein, 40 aa, Thermosynechococcus elongatus; identical to SEQ ID NO: 2657

SEQ ID NO: 2659 - protein, 95 aa, Thermosynechococcus elongatus
ASVVPQERQQVARKHYPNYKVIVLNDDFNTFRHVAACLMKYNPNMTSDRAWELTNQVHYEGQAIVWVGPQVQAELYHEQLLRAGLTMAPLEPGGS

SEQ ID NO: 2660 - protein, 95 aa, Thermosynechococcus elongatus
ASVVPQERQQVARKHYPNYKVIVLNDDFNTFRHVAACLMKYTPNMISDRAWELTNQVHYGGRAIVWVGPQEQAELYHEQLLRAGLTMAPLEPEGS

SEQ ID NO: 2661 - protein, 95 aa, Thermosynechococcus elongatus
ASVVPQERQQVARKHYPNYKVIVLNDDFNTFRHVAACLMKYTPNITSDRAWELTNQVHYEGQAIVWVGPQVQAELYHEQLLRAGLTMAPLEPGGS

SEQ ID NO: 2662 - protein, 95 aa, Thermosynechococcus elongatus; identical to SEQ ID NO: 3

SEQ ID NO: 2663 - protein, 95 aa, Thermosynechococcus elongatus
ASVVPQERQQVARKHYPNYKVIVLNDDFNTFRHVAACLMKYITNKTSDRAWELTNQVHYEGQAIVWVGPQEQAELYHEQLLRAGLTMAPLEPGGS

SEQ ID NO: 2664 - protein, 77 aa, Thermosynechococcus elongatus
ASVVPQERQQVARKHYPNYKVIVLNDDFNTFRHVAACLMKYITNMTSDRAWELTNQVHYEGKAIVWVGPQVQAELYH

SEQ ID NO: 2665 - protein, 95 aa, Thermosynechococcus elongatus
ASVVPQERQQVARKHYPNYKVIVLNDDFNTFRHVAACLMKYITNMTSDRAWELTNQVHYEGQAIVWVGPQVQAELYHEQLLRAGLTRAPLEPGGS

SEQ ID NO: 2666 - protein, 95 aa, Thermosynechococcus elongatus
ASVVPQERQQVARKHYPNYKVIVLNDDFNTFRHVAACLMKYITNMTSDRACELTNQVQYEGQAIVFVGTQEQAELYHEQLLRAGLTMAPLEPEGS

SEQ ID NO: 2667 - protein, 95 aa, Thermosynechococcus elongatus
ASVVPQERQQVARKHYPNYKVIVLNDDFNTFRHVAACLMKYITNMTSDRAWELTNQVHYKGQAIVWVGPQEQAELNHEQLLRAGLTMAPLEPEGS

SEQ ID NO: 2668 - protein, 95 aa, Thermosynechococcus elongatus
ASVVPQERQQVARKHYPNYKVIVLNDDFNTFRHVAACLMKYIQNMTSDRAWELTNQVHYEGQAIVWVGPQEQAELYHEQLLRAGLTMAPLEPEGS

SEQ ID NO: 2669 - protein, 95 aa, Thermosynechococcus elongatus
ASVVPQERQQVARKHYPNYKVIVLNDDFNTFRHVAACLMKYIQNMTSDRAWELTNQVHYGGRAIVWVGPQEQAELYHEQLLRAGLTMAPLEPEGS

SEQ ID NO: 2670 - protein, 94 aa, Thermosynechococcus elongatus
ASVVPQERQQVARKHYPNYKVIVLNDDFNTFRHVAACLMKYIPNKTDRAWELTNQVHYEGQAIVWVGPQEQAEFYHEQLLRAGLTMAPLEPEGS

SEQ ID NO: 2671 - protein, 95 aa, Thermosynechococcus elongatus
ASVVPQERQQVARKHYPNYKVIVLNDDFNTFRHVAACLMKYIPNKTSDRAWELTNQGHYEGQAIVWVGPQEQAELYHEQLLRAGLTMAPLEPEGS

SEQ ID NO: 2672 - protein, 77 aa, Thermosynechococcus elongatus
ASVVPQERQQVARKHYPNYKVIVLNDDFNTFRHVAACLMKYIPNKTSDRAWELTNQVHYEGQAIVWVGPQEQAELYH

SEQ ID NO: 2673 - protein, 95 aa, Thermosynechococcus elongatus
ASVVPQERQQVARKHYPNYKVIVLNDDFNTFRHVAACLMKYIPNKTSDRAWELTNQVHYEGQAIVWVGPQVQAELYHVQLLRAGLTMAPLEPEGS

SEQ ID NO: 2674 - protein, 95 aa, Thermosynechococcus elongatus
ASVVPQERQQVARKHYPNYKVIVLNDDFNTFRHVAACLMKYIPNKTSDRAWELTNQVHYEGQAIVRVGPQEQAELYHKQLLRAGLTMAPLEPEGS

SEQ ID NO: 2675 - protein, 95 aa, Thermosynechococcus elongatus
ASVVPQERQQVARKHYPNYKVIVLNDDFNTFRHVAACLMKYIPNKTSDRAWELTNQVHYEGQAIVWAGPQEQAELYHEQLLRAGLTMAPLEPEGS

SEQ ID NO: 2676 - protein, 95 aa, Thermosynechococcus elongatus; identical to SEQ ID NO: 21

SEQ ID NO: 2677 - protein, 77 aa, Thermosynechococcus elongatus
ASVVPQERQQVARKHYPNYKVIVLNDDFNTFRHVAACLMKYIPNKTSDRAWELTNQVHYEGQAIVWVGPQEQAELNH

SEQ ID NO: 2678 - protein, 95 aa, Thermosynechococcus elongatus
ASVVPQERQQVARKHYPNYKVIVLNDDFNTFRHVAACLMKYIPNKTSDRAWELTNQVHYEGQAIVWVGPQEQAELYQEQLLRAGLTRAPLEPEGS

SEQ ID NO: 2679 - protein, 79 aa, Thermosynechococcus elongatus
ASVVPQERQQVARKHYPNYKVIVLNDDFNTFRHVAACLMKYIPNKTSDRAWELTNQVHYEGQAIVWVGPQEQAELYHEQ

SEQ ID NO: 2680 - protein, 95 aa, Thermosynechococcus elongatus
ASVVPQERQQVARKHYPNYKVIVLNDDFNTFRHVAACLMKYIPNKTSDRAWELTNQVHYEGQAIVWVGPQEQAELYHEQLMRAGLTMAPLEPEGS

SEQ ID NO: 2681 - protein, 95 aa, Thermosynechococcus elongatus
ASVVPQERQQVARKHYPNYKVIVLNDDFNTFRHVAACLMKYIPNKTSDRAWELTNQVHYEGQAIVWVGPQEQAELYHEQLLRAGLTMAPLEQEGS

SEQ ID NO: 2682 - protein, 95 aa, Thermosynechococcus elongatus
ASVVPQERQQVARKHYPNYKVIVLNDDFNTFRHVAACLMKYIPNKTSDRAWELTNQVHYEGQAIVWVGPQEQAELYHEQLLRAGLTMAPLEREGS

SEQ ID NO: 2683 - protein, 95 aa, Thermosynechococcus elongatus
ASVVPQERQQVARKHYPNYKVIVLNDDFNTFRHVAACLMKYIPNKTSDRAWELTNQVHYEGQAIVWVGPQEQAELYHEQLLRAGLTIAPLEPEGS

SEQ ID NO: 2684 - protein, 95 aa, Thermosynechococcus elongatus
ASVVPQERQQVARKHYPNYKVIVLNDDFNTFRHVAACLMKYIPNKTSDRAWELTNQVHYEGQAIVWVGPQEQAELYHEQLLRAGLSMAPLEPEGS

SEQ ID NO: 2685 - protein, 95 aa, Thermosynechococcus elongatus
ASVVPQERQQVARKHYPNYKVIVLNDDFNTFRHVAACLMKYIPNKTSDRAWELTNQVHYEGQAIVWVGPQEQAVLYHEQLLRAGLTMAPLEPEGS

SEQ ID NO: 2686 - protein, 95 aa, Thermosynechococcus elongatus
ASVVPQERQQVARKHYPNYKVIVLNDDFNTFRHVAACLMKYIPNKTSDRAWELTNQVHYEGQAIVWVGPREQAELYHEQLLRVGLTMAPLEPEGS

SEQ ID NO: 2687 - protein, 95 aa, Thermosynechococcus elongatus
ASVVPQERQQVARKHYPNYKVIVLNDDFNTFRHVAACLMKYIPNKTSDRAWELTNQVHYEGQAIVWVGPLEQAELYHEQLLRAGLTMAPLVPEGS

SEQ ID NO: 2688 - protein, 95 aa, Thermosynechococcus elongatus
ASVVPQERQQVARKHYPNYKVIVLNDDFNTFRHVAACLMKYIPNKTSDRAWELTNQVHYEGLAIVWVGPQEQAELYHEQLLRAGLTRAPLEPEGS

SEQ ID NO: 2689 - protein, 95 aa, Thermosynechococcus elongatus
ASVVPQERQQVARKHYPNYKVIVLNDDFNTFRHVAACLMKYIPNKTSDRAWELTNQVHYEGLAIVWVGPQEQAELYHEQLLRAGLTMAPLEPEGS

SEQ ID NO: 2690 - protein, 95 aa, Thermosynechococcus elongatus
ASVVPQERQQVARKHYPNYKVIVLNDDFNTFRHVAACLMKYIPNKTSDRAWELTNQVHYDGQAIVWVGPQEQAELYHEQLLRAGLTMAPLEPEGS

SEQ ID NO: 2691 - protein, 95 aa, Thermosynechococcus elongatus
ASVVPQERQQVARKHYPNYKVIVLNDDFNTFRHVAACLMKYIPNKTSDRAWELTNQVHYAGQAIVWVGPQEQAELYHEQLLRARLTMAPLEPEGS

SEQ ID NO: 2692 - protein, 95 aa, Thermosynechococcus elongatus; identical to SEQ ID NO: 261

SEQ ID NO: 2693 - protein, 95 aa, Thermosynechococcus elongatus
ASVVPQERQQVARKHYPNYKVIVLNDDFNTFRHVAACLMKYIPNKTSDRAWELTNQVHYVGQAIVWVGPQEQAELYHEQLLRAGLTMAPLEPKGS

SEQ ID NO: 2694 - protein, 95 aa, Thermosynechococcus elongatus
ASVVPQERQQVARKHYPNYKVIVLNDDFNTFRHVAACLMKYIPNKTSDRAWELTNQVHYVGQAIVWVGPQDRAELYHEQWLRAGLTMAPLEPEGS

SEQ ID NO: 2695 - protein, 95 aa, Thermosynechococcus elongatus
ASVVPQERQQVARKHYPNYKVIVLNDDFNTFRHVAACLMKYIPNKTSDRACELTNQVHYEGQAIVWVGPQEQAELYHEQLLRAGLTMAPLEPEGS

SEQ ID NO: 2696 - protein, 95 aa, Thermosynechococcus elongatus
ASVVPQERQQVARKHYPNYKVIVLNDDFNTFRHVAACLMKYIPNKTSDRALELTNQVHYEGQAIVWVGPQEQAELYHEQLLRAGLTMAPLEPEGS

SEQ ID NO: 2697 - protein, 95 aa, Thermosynechococcus elongatus
ASVVPQERQQVARKHYPNYKVIVLNDDFNTFRHVAACLMKYIPNKTSDIAWELTNQVHYEGQAIVWVGPQEQAELYHEQLLRAGLTMAPLEPEGS

SEQ ID NO: 2698 - protein, 95 aa, Thermosynechococcus elongatus
ASVVPQERQQVARKHYPNYKVIVLNDDFNTFRHVAACLMKYIPNTTSDRAWELTNQVHYEGQAIVWVGPQVQAELYHEQLLRAGLTMAPLEPGGS

SEQ ID NO: 2699 - protein, 95 aa, Thermosynechococcus elongatus; identical to SEQ ID NO: 9

SEQ ID NO: 2700 - protein, 95 aa, Thermosynechococcus elongatus; identical to SEQ ID NO: 9

SEQ ID NO: 2701 - protein, 95 aa, Thermosynechococcus elongatus; identical to SEQ ID NO: 3

SEQ ID NO: 2702 - protein, 95 aa, Thermosynechococcus elongatus; identical to SEQ ID NO: 96

SEQ ID NO: 2703 - protein, 95 aa, Thermosynechococcus elongatus; identical to SEQ ID NO: 6

SEQ ID NO: 2704 - protein, 95 aa, Thermosynechococcus elongatus
ASVVPQERQQVARKHYPNYKVIVLNDDFNTFRHVAACLMKYIPNMTSYRAWELTNQVHYEGQAIVWVGPQEQAELYHEQLLRAGLTMAPLEPEGS

SEQ ID NO: 2705 - protein, 95 aa, Thermosynechococcus elongatus; identical to SEQ ID NO: 3

SEQ ID NO: 2706 - protein, 95 aa, Thermosynechococcus elongatus
ASVVPQERQQVARKHYPNYKVIVLNDDFNTFRHVAACLMKYIPNMTPDRAWELTNQVHYEGQAIVWVGPQVQAELYHEQLLRAGLTMAPLEPEGS

SEQ ID NO: 2707 - protein, 95 aa, Thermosynechococcus elongatus
ASVVPQERQQVARKHYPNYKVIVLNDDFNTFRHVAACLMKYIPNMTADRAWELTNQVHYEGQAIVWVGPQVQAELYHEQLLRAGLTMAPLEPGGS

SEQ ID NO: 2708 - protein, 95 aa, Thermosynechococcus elongatus
ASVVPQERQQVARKHYPNYKVIVLNDDFNTFRHVAACLMKYIPNMTYDRAWELTNQVHYEGQAIVWVGPQEQAELYHEQLLRAGLTMAPLEPEGS

SEQ ID NO: 2709 - protein, 95 aa, Thermosynechococcus elongatus
ASVVPQERQQVARKHYPNYKVIVLNDDFNTFRHVAACLMKYIPNMTYDRAWELTNQVHYEGQAIVWVGPQVQAESYHEQLLRAGLTMAPLEPGGS

SEQ ID NO: 2710 - protein, 95 aa, Thermosynechococcus elongatus
ASVVPQERQQVARKHYPNYKVIVLNDDFNTFRHVAACLMKYIPNMTSERAWELTNQVHYGGQAIVWVGPQVQAELYHEQLLRAGLTMAPLEPGGS

SEQ ID NO: 2711 - protein, 95 aa, Thermosynechococcus elongatus
ASVVPQERQQVARKHYPNYKVIVLNDDFNTFRHVAACLMKYIPNMTSDKAWELTNQVHYEGQAIVWVGPQEQAELYHEQLLRAGLTMAPLEPEGS

SEQ ID NO: 2712 - protein, 95 aa, Thermosynechococcus elongatus; identical to SEQ ID NO: 3

SEQ ID NO: 2713 - protein, 95 aa, Thermosynechococcus elongatus; identical to SEQ ID NO: 166

SEQ ID NO: 2714 - protein, 95 aa, Thermosynechococcus elongatus
ASVVPQERQQVARKHYPNYKVIVLNDDFNTFRHVAACLMKYIPNMTSDRAWELTNHVHYEGQAIVWVGPQEPAELYHEQLLRAGLTLAPLEPGGS

SEQ ID NO: 2715 - protein, 95 aa, Thermosynechococcus elongatus
ASVVPQERQQVARKHYPNYKVIVLNDDFNTFRHVAACLMKYIPNMTSDRAGELTNQGHYEGQAIVWVGPQVQAELYHEQLLRAGLTMAPLEPGGS

SEQ ID NO: 2716 - protein, 95 aa, Thermosynechococcus elongatus
ASVVPQERQQVARKHYPNYKVIVLNDDFNTFRHVAACLMKYIPNMTSDRAGELTNQVHYEGQAIVWVGPQEQAELYHEQLLRAGLTMAPLEPEGS

SEQ ID NO: 2717 - protein, 50 aa, Thermosynechococcus elongatus
ASVVPQERQQVARKHYPNYKVIVLNDDFNTFRHVAACLMKYIPNMTSDRA

SEQ ID NO: 2718 - protein, 58 aa, Thermosynechococcus elongatus
ASVVPQERQQVARKHYPNYKVIVLNDDFNTFRHVAACLMKYIPNMTSDRACELTNQVL

SEQ ID NO: 2719 - protein, 95 aa, Thermosynechococcus elongatus; identical to SEQ ID NO: 9

SEQ ID NO: 2720 - protein, 80 aa, Thermosynechococcus elongatus
ASVVPQERQQVARKHYPNYKVIVLNDDFNTFRHVAACLMKYIPNMTSDRAWELTTKFTTKVKLSFGLVHKNKLNYTTNNC

SEQ ID NO: 2721 - protein, 95 aa, Thermosynechococcus elongatus; identical to SEQ ID NO: 3

SEQ ID NO: 2722 - protein, 95 aa, Thermosynechococcus elongatus; identical to SEQ ID NO: 3

SEQ ID NO: 2723 - protein, 95 aa, Thermosynechococcus elongatus; identical to SEQ ID NO: 1318

SEQ ID NO: 2724 - protein, 95 aa, Thermosynechococcus elongatus; identical to SEQ ID NO: 873

SEQ ID NO: 2725 - protein, 95 aa, Thermosynechococcus elongatus
ASVVPQERQQVARKHYPNYKVIVLNDDFNTFRHVAACLMKYIPNMTSDRAWELTNKVHYEGQAIVWVGPQEQAELYHEQLLRAGLTMAPLEPEGS

SEQ ID NO: 2726 - protein, 95 aa, Thermosynechococcus elongatus
ASVVPQERQQVARKHYPNYKVIVLNDDFNTFRHVAACLMKYIPNMTSDRAWELTNNVHYEGQAIVWVGPQVQAELYHEQLLRAGLTMAPLEPGGS

SEQ ID NO: 2727 - protein, 95 aa, Thermosynechococcus elongatus
ASVVPQERQQVARKHYPNYKVIVLNDDFNTFRHVAACLMKYIPNMTSDRAWELTNQIHYEGQAIVWVGPQVQAELYHEQLLRAGLTMAPLEPGGS

SEQ ID NO: 2728 - protein, 95 aa, Thermosynechococcus elongatus
ASVVPQERQQVARKHYPNYKVIVLNDDFNTFRHVAACLMKYIPNMTSDRAWELTNQLHYQGQAIVWVGPQVQAELYHEQLLRAGLTMAPLEPEGS

SEQ ID NO: 2729 - protein, 95 aa, Thermosynechococcus elongatus
ASVVPQERQQVARKHYPNYKVIVLNDDFNTFRHVAACLMKYIPNMTSDRAWELTNQLHYEAQAIVWVGPQVQAELYHEQLLRAGLTMAPLEPGGS

SEQ ID NO: 2730 - protein, 95 aa, Thermosynechococcus elongatus
ASVVPQERQQVARKHYPNYKVIVLNDDFNTFRHVAACLMKYIPNMTSDRAWELTNQLHYEGQAIVWVGPQVQAELYHEQLLRAGFTMAPLEPGGS

SEQ ID NO: 2731 - protein, 95 aa, Thermosynechococcus elongatus
ASVVPQERQQVARKHYPNYKVIVLNDDFNTFRHVAACLMKYIPNMTSDRAWELTNQAHYEGQAIVWVGPQVQAELYHEQLLRAGLTMAPLEPGGS

SEQ ID NO: 2732 - protein, 95 aa, Thermosynechococcus elongatus
ASVVPQERQQVARKHYPNYKVIVLNDDFNTFRHVAACLMKYIPNMTSDRAWELTNQGHYEGQAIVWVGPQEQAELYHEQLLRAGLTMAPLEPEGS

SEQ ID NO: 2733 - protein, 95 aa, Thermosynechococcus elongatus
ASVVPQERQQVARKHYPNYKVIVLNDDFNTFRHVAACLMKYIPNMTSDRAWELTNQGHYEGQAIVWVGPQVQAELYHEHLLRAGLTMAPLEPGGS

SEQ ID NO: 2734 - protein, 95 aa, Thermosynechococcus elongatus; identical to SEQ ID NO: 3

SEQ ID NO: 2735 - protein, 80 aa, Thermosynechococcus elongatus
ASVVPQERQQVARKHYPNYKVIVLNDDFNTFRHVAACLMKYIPNMTSDRAWELTNQVTTKVKLSFGLVHKNKLNYTTNNC

SEQ ID NO: 2736 - protein, 95 aa, Thermosynechococcus elongatus
ASVVPQERQQVARKHYPNYKVIVLNDDFNTFRHVAACLMKYIPNMTSDRAWELTNQVNYEGQAIVWVGPQVQAELYHEQLLRAGLTMAPLEPEGS

SEQ ID NO: 2737 - protein, 95 aa, Thermosynechococcus elongatus
ASVVPQERQQVARKHYPNYKVIVLNDDFNTFRHVAACLMKYIPNMTSDRAWELTNQVNYECQAFVWVGPRVQAELYHEQLLRAGLTMAPLEPGGS

SEQ ID NO: 2738 - protein, 58 aa, Thermosynechococcus elongatus
ASVVPQERQQVARKHYPNYKVIVLNDDFNTFRHVAACLMKYIPNMTSDRAWELTNQVQ

SEQ ID NO: 2739 - protein, 95 aa, Thermosynechococcus elongatus
ASVVPQERQQVARKHYPNYKVIVLNDDFNTFRHVAACLMKYIPNMTSDRAWELTNQVQYEGQSIVWVGTQVQAELYNEQLLRAGLTMAPLEPGGS

SEQ ID NO: 2740 - protein, 95 aa, Thermosynechococcus elongatus
ASVVPQERQQVARKHYPNYKVIVLNDDFNTFRHVAACLMKYIPNMTSDRAWELTNQVQLEGQAIVWVGPQVQAELYHELLLRAGLTMAPLEPGGS

SEQ ID NO: 2741 - protein, 95 aa, Thermosynechococcus elongatus
ASVVPQERQQVARKHYPNYKVIVLNDDFNTFRHVAACLMKYIPNMTSDRAWELTNQVHNEGQAIVWVGPQEQAELYHEQLLRAGLTMAPLEPEGS

SEQ ID NO: 2742 - protein, 95 aa, Thermosynechococcus elongatus
ASVVPQERQQVARKHYPNYKVIVLNDDFNTFRHVAACLMKYIPNMTSDRAWELTNQVHHEGQAIVWVGPQEQAELNHEQLLRAGLTMAPLEPEGS

SEQ ID NO: 2743 - protein, 95 aa, Thermosynechococcus elongatus
ASVVPQERQQVARKHYPNYKVIVLNDDFNTFRHVAACLMKYIPNMTSDRAWELTNQVHHEGQAIVWVGPQVQAELYHEQLLRAGLTMAPLEPGGS

SEQ ID NO: 2744 - protein, 58 aa, Thermosynechococcus elongatus; identical to SEQ ID NO: 874

SEQ ID NO: 2745 - protein, 58 aa, Thermosynechococcus elongatus; identical to SEQ ID NO: 874

SEQ ID NO: 2746 - protein, 58 aa, Thermosynechococcus elongatus; identical to SEQ ID NO: 874

SEQ ID NO: 2747 - protein, 58 aa, Thermosynechococcus elongatus; identical to SEQ ID NO: 874

SEQ ID NO: 2748 - protein, 58 aa, Thermosynechococcus elongatus; identical to SEQ ID NO: 874

SEQ ID NO: 2749 - protein, 58 aa, Thermosynechococcus elongatus; identical to SEQ ID NO: 874

SEQ ID NO: 2750 - protein, 58 aa, Thermosynechococcus elongatus; identical to SEQ ID NO: 874

SEQ ID NO: 2751 - protein, 95 aa, Thermosynechococcus elongatus
ASVVPQERQQVARKHYPNYKVIVLNDDFNTFRHVAACLMKYIPNMTSDRAWELTNQVHYKGQAIVWVGPQEQAELNHEQLLRAGLTRAPLEPEGS

SEQ ID NO: 2752 - protein, 95 aa, Thermosynechococcus elongatus
ASVVPQERQQVARKHYPNYKVIVLNDDFNTFRHVAACLMKYIPNMTSDRAWELTNQVHYKGQAIVWVGPQEQAELNHEQLLRAGLTMATLEPEGS

SEQ ID NO: 2753 - protein, 95 aa, Thermosynechococcus elongatus
ASVVPQERQQVARKHYPNYKVIVLNDDFNTFRHVAACLMKYIPNMTSDRAWELTNQVHYKGQAIVWVGPQEQAELNHEQLLRAGLTMASLEPEGS

SEQ ID NO: 2754 - protein, 77 aa, Thermosynechococcus elongatus
ASVVPQERQQVARKHYPNYKVIVLNDDFNTFRHVAACLMKYIPNMTSDRAWELTNQVHYKGQAIVWVGPQEQAELNH

SEQ ID NO: 2755 - protein, 95 aa, Thermosynechococcus elongatus; identical to SEQ ID NO: 284

SEQ ID NO: 2756 - protein, 95 aa, Thermosynechococcus elongatus
ASVVPQERQQVARKHYPNYKVIVLNDDFNTFRHVAACLMKYIPNMTSDRAWELTNQVHYKGQAIVWVGPQEQAELYHEQLLRAGLTMAPLEQEGS

SEQ ID NO: 2757 - protein, 95 aa, Thermosynechococcus elongatus; identical to SEQ ID NO: 899

SEQ ID NO: 2758 - protein, 95 aa, Thermosynechococcus elongatus
ASVVPQERQQVARKHYPNYKVIVLNDDFNTFRHVAACLMKYIPNMTSDRAWELTNQVHYKGQAIVWVGPREQAELYHEQLLRAGLTMAPLEPEGS

SEQ ID NO: 2759 - protein, 95 aa, Thermosynechococcus elongatus; identical to SEQ ID NO: 284

SEQ ID NO: 2760 - protein, 95 aa, Thermosynechococcus elongatus; identical to SEQ ID NO: 35

SEQ ID NO: 2761 - protein, 95 aa, Thermosynechococcus elongatus
ASVVPQERQQVARKHYPNYKVIVLNDDFNTFRHVAACLMKYIPNMTSDRAWELTNQVHYKGQSIVWVGPQEQAELNHEQLLRAGLTMAPLEPEGS

SEQ ID NO: 2762 - protein, 95 aa, Thermosynechococcus elongatus
ASVVPQERQQVARKHYPNYKVIVLNDDFNTFRHVAACLMKYIPNMTSDRAWELTNQVHYKGHAIVWVGPQEQAELNHEQLLRAGLTMAPLEPGGS

SEQ ID NO: 2763 - protein, 95 aa, Thermosynechococcus elongatus
ASVVPQERQQVARKHYPNYKVIVLNDDFNTFRHVAACLMKYIPNMTSDRAWELTNQVHYNGQAIVWVGPQEQAELNHEQLLRAGLTMAPLEPEGS

SEQ ID NO: 2764 - protein, 95 aa, Thermosynechococcus elongatus
ASVVPQERQQVARKHYPNYKVIVLNDDFNTFRHVAACLMKYIPNMTSDRAWELTNQVHYEAQAIVWVGPQVQAELYHEQLLRAGLTMAPLEPEGS

SEQ ID NO: 2765 - protein, 95 aa, Thermosynechococcus elongatus; identical to SEQ ID NO: 528

SEQ ID NO: 2766 - protein, 95 aa, Thermosynechococcus elongatus
ASVVPQERQQVARKHYPNYKVIVLNDDFNTFRHVAACLMKYIPNMTSDRAWELTNQVHYEGKAIVWVGPQEQAELYHEQLLRAGLTMAPLEPEGS

SEQ ID NO: 2767 - protein, 95 aa, Thermosynechococcus elongatus
ASVVPQERQQVARKHYPNYKVIVLNDDFNTFRHVAACLMKYIPNMTSDRAWELTNQVHYEGKAIVWVGPQVQAELYHEQLLRAGLTMAPLEPEGS

SEQ ID NO: 2768 - protein, 95 aa, Thermosynechococcus elongatus
ASVVPQERQQVARKHYPNYKVIVLNDDFNTFRHVAACLMKYIPNMTSDRAWELTNQVHYEGKAIVWVGPQVQAELYHEQLLRAGLTMAPLEPGGS

SEQ ID NO: 2769 - protein, 95 aa, Thermosynechococcus elongatus
ASVVPQERQQVARKHYPNYKVIVLNDDFNTFRHVAACLMKYIPNMTSDRAWELTNQVHYEGQTIVWVGPQVQAELYHEQLLRAGFTMAPLEPGGS

SEQ ID NO: 2770 - protein, 95 aa, Thermosynechococcus elongatus
ASVVPQERQQVARKHYPNYKVIVLNDDFNTFRHVAACLMKYIPNMTSDRAWELTNQVHYEGQAIVWVGPQEQAELYHEQLLRAGLTLAPLEPEGS

SEQ ID NO: 2771 - protein, 95 aa, Thermosynechococcus elongatus; identical to SEQ ID NO: 9

SEQ ID NO: 2772 - protein, 95 aa, Thermosynechococcus elongatus
ASVVPQERQQVARKHYPNYKVIVLNDDFNTFRHVAACLMKYIPNMTSDRAWELTNQVHYEGQANVWVGPQVQAELYHEQLLRAGLTMAPLEPGGS

SEQ ID NO: 2773 - protein, 95 aa, Thermosynechococcus elongatus
ASVVPQERQQVARKHYPNYKVIVLNDDFNTFRHVAACLMKYIPNMTSDRAWELTNQVHYEGQAIVWVGPQEQDELYHEQLLRAGLTMAPLEPEGS

SEQ ID NO: 2774 - protein, 95 aa, Thermosynechococcus elongatus; identical to SEQ ID NO: 9

SEQ ID NO: 2775 - protein, 95 aa, Thermosynechococcus elongatus
ASVVPQERQQVARKHYPNYKVIVLNDDFNTFRHVAACLMKYIPNMTSDRAWELTNQVHYEGQAIDWVGPQEQAELYHEQLLRAGLTMAPLEPEGS

SEQ ID NO: 2776 - protein, 95 aa, Thermosynechococcus elongatus
ASVVPQERQQVARKHYPNYKVIVLNDDFNTFRHVAACLMKYIPNMTSDRAWELTNQVHYEGQAIDWVGPQVQAELYHEQLLRAGLTMAPLEPEGS

SEQ ID NO: 2777 - protein, 95 aa, Thermosynechococcus elongatus
ASVVPQERQQVARKHYPNYKVIVLNDDFNTFRHVAACLMKYIPNMTSDRAWELTNQVHYEGQAIVWVGPQEQAELNHEQLLRAGLTMAPLEPGGS

SEQ ID NO: 2778 - protein, 95 aa, Thermosynechococcus elongatus; identical to SEQ ID NO: 66

SEQ ID NO: 2779 - protein, 95 aa, Thermosynechococcus elongatus; identical to SEQ ID NO: 6

SEQ ID NO: 2780 - protein, 95 aa, Thermosynechococcus elongatus; identical to SEQ ID NO: 3

SEQ ID NO: 2781 - protein, 95 aa, Thermosynechococcus elongatus
ASVVPQERQQVARKHYPNYKVIVLNDDFNTFRHVAACLMKYIPNMTSDRAWELTNQVHYEGQAIVRVGPQEQAELYHIQLLRAGLTMAPLEPEGS

SEQ ID NO: 2782 - protein, 95 aa, Thermosynechococcus elongatus
ASVVPQERQQVARKHYPNYKVIVLNDDFNTFRHVAACLMKYIPNMTSDRAWELTNQVHYEGQAIVWIGPQVQAELYHEQLLRAGLTMAPLEPGGS

SEQ ID NO: 2783 - protein, 95 aa, Thermosynechococcus elongatus
ASVVPQERQQVARKHYPNYKVIVLNDDFNTFRHVAACLMKYIPNMTSDRAWELTNQVHYEGQAIVWDGPQVQAELYHEQLLRAGLTMAPLEPGGS

SEQ ID NO: 2784 - protein, 95 aa, Thermosynechococcus elongatus
ASVVPQERQQVARKHYPNYKVIVLNDDFNTFRHVAACLMKYIPNMTSDRAWELTNQVHYEGQAIVWAGPQVQAELYHEQLLRAGLTMAPFEPGGS

SEQ ID NO: 2785 - protein, 90 aa, Thermosynechococcus elongatus
ASVVPQERQQVARKHYPNYKVIVLNDDFNTFRHVAACLMKYIPNMTSDRAWELTNQVHYEGQAIVWAGPQVQAELYQELLLRAGLTMAPL

SEQ ID NO: 2786 - protein, 95 aa, Thermosynechococcus elongatus
ASVVPQERQQVARKHYPNYKVIVLNDDFNTFRHVAACLMKYIPNMTSDRAWELTNQVHYEGQAIVWGGPQVQAELYHEQLLRAGLTMAPLEPEGS

SEQ ID NO: 2787 - protein, 95 aa, Thermosynechococcus elongatus; identical to SEQ ID NO: 338

SEQ ID NO: 2788 - protein, 80 aa, Thermosynechococcus elongatus
ASVVPQERQQVARKHYPNYKVIVLNDDFNTFRHVAACLMKYIPNMTSDRAWELTNQVHYEGQAIVWVGHKNKLNYTTNNC

SEQ ID NO: 2789 - protein, 95 aa, Thermosynechococcus elongatus
ASVVPQERQQVARKHYPNYKVIVLNDDFNTFRHVAACLMKYIPNMTSDRAWELTNQVHYEGQAIVWVGTQEQAELYHEQLLRAGLTMAPLEPEGS

SEQ ID NO: 2790 - protein, 95 aa, Thermosynechococcus elongatus
ASVVPQERQQVARKHYPNYKVIVLNDDFNTFRHVAACLMKYIPNMTSDRAWELTNQVHYEGQAIVWVGQQEQAELYHEQLLRAGLTMAPLEPEGS

SEQ ID NO: 2791 - protein, 95 aa, Thermosynechococcus elongatus
ASVVPQERQQVARKHYPNYKVIVLNDDFNTFRHVAACLMKYIPNMTSDRAWELTNQVHYEGQAIVWVGQQVQAELYHEQLLRAGLTMAPLEPEGS

SEQ ID NO: 2792 - protein, 95 aa, Thermosynechococcus elongatus; identical to SEQ ID NO: 2791

SEQ ID NO: 2793 - protein, 95 aa, Thermosynechococcus elongatus
ASVVPQERQQVARKHYPNYKVIVLNDDFNTFRHVAACLMKYIPNMTSDRAWELTNQVHYEGQAIVWVGQQVQAELYHEQLLRAGLTMAPLEPGGS

SEQ ID NO: 2794 - protein, 95 aa, Thermosynechococcus elongatus
ASVVPQERQQVARKHYPNYKVIVLNDDFNTFRHVAACLMKYIPNMTSDRAWELTNQVHYEGQAIVWVGPKEQAELYHEQLLRAGLTMAPLEPEGS

SEQ ID NO: 2795 - protein, 95 aa, Thermosynechococcus elongatus
ASVVPQERQQVARKHYPNYKVIVLNDDFNTFRHVAACLMKYIPNMTSDRAWELTNQVHYEGQAIVWVGPQKQAELYHEQLLRAGLTMAPLEPEGS

SEQ ID NO: 2796 - protein, 95 aa, Thermosynechococcus elongatus
ASVVPQERQQVARKHYPNYKVIVLNDDFNTFRHVAACLMKYIPNMTSDRAWELTNQVHYEGQAIVWVGPQIQAELYHEQLLRAGLTMAPLEPEGS

SEQ ID NO: 2797 - protein, 95 aa, Thermosynechococcus elongatus
ASVVPQERQQVARKHYPNYKVIVLNDDFNTFRHVAACLMKYIPNMTSDRAWELTNQVHYEGQAIVWVGPQEQAKLNHEQLLRAGLTMAPLEPEGS

SEQ ID NO: 2798 - protein, 95 aa, Thermosynechococcus elongatus; identical to SEQ ID NO: 2777

SEQ ID NO: 2799 - protein, 95 aa, Thermosynechococcus elongatus
ASVVPQERQQVARKHYPNYKVIVLNDDFNTFRHVAACLMKYIPNMTSDRAWELTNQVHYEGQAIVWVGPQEQAELDHEQLWRAGLTMAPLEPEGS

SEQ ID NO: 2800 - protein, 95 aa, Thermosynechococcus elongatus
ASVVPQERQQVARKHYPNYKVIVLNDDFNTFRHVAACLMKYIPNMTSDRAWELTNQVHYEGQAIVWVGPQEQAELDHEQLLRAGLTMAPLEPEGS

SEQ ID NO: 2801 - protein, 95 aa, Thermosynechococcus elongatus; identical to SEQ ID NO: 2800

SEQ ID NO: 2802 - protein, 95 aa, Thermosynechococcus elongatus
ASVVPQERQQVARKHYPNYKVIVLNDDFNTFRHVAACLMKYIPNMTSDRAWELTNQVHYEGQAIVWVGPQEQAELYQEQLLRAGLTMAPLEPEGS

SEQ ID NO: 2803 - protein, 95 aa, Thermosynechococcus elongatus
ASVVPQERQQVARKHYPNYKVIVLNDDFNTFRHVAACLMKYIPNMTSDRAWELTNQVHYEGQAIVWVGPQEQAELYHKQLLRAGLTMAPLEPGGS

SEQ ID NO: 2804 - protein, 95 aa, Thermosynechococcus elongatus; identical to SEQ ID NO: 6

SEQ ID NO: 2805 - protein, 95 aa, Thermosynechococcus elongatus
ASVVPQERQQVARKHYPNYKVIVLNDDFNTFRHVAACLMKYIPNMTSDRAWELTNQVHYEGQAIVWVGPQEQAELYHEQVLRAGLTMAPLEPEGS

SEQ ID NO: 2806 - protein, 95 aa, Thermosynechococcus elongatus
ASVVPQERQQVARKHYPNYKVIVLNDDFNTFRHVAACLMKYIPNMTSDRAWELTNQVHYEGQAIVWVGPQEQAELYHEQSLRAGLTMAPLEPEGS

SEQ ID NO: 2807 - protein, 95 aa, Thermosynechococcus elongatus
ASVVPQERQQVARKHYPNYKVIVLNDDFNTFRHVAACLMKYIPNMTSDRAWELTNQVHYEGQAIVWVGPQEQAELYHEQFLRAGLTMAPLEPEGS

SEQ ID NO: 2808 - protein, 95 aa, Thermosynechococcus elongatus
ASVVPQERQQVARKHYPNYKVIVLNDDFNTFRHVAACLMKYIPNMTSDRAWELTNQVHYEGQAIVWVGPQEQAELYHEQFLRAGLTMAPLEPGGS

SEQ ID NO: 2809 - protein, 95 aa, Thermosynechococcus elongatus
ASVVPQERQQVARKHYPNYKVIVLNDDFNTFRHVAACLMKYIPNMTSDRAWELTNQVHYEGQAIVWVGPQEQAELYHEQLVRAGLTMAPLEPEGS

SEQ ID NO: 2810 - protein, 95 aa, Thermosynechococcus elongatus
ASVVPQERQQVARKHYPNYKVIVLNDDFNTFRHVAACLMKYIPNMTSDRAWELTNQVHYEGQAIVWVGPQEQAELYHEQLSRAGLTMAPLEPEGS

SEQ ID NO: 2811 - protein, 95 aa, Thermosynechococcus elongatus
ASVVPQERQQVARKHYPNYKVIVLNDDFNTFRHVAACLMKYIPNMTSDRAWELTNQVHYEGQAIVWVGPQEQAELYHEQLWRAGLTMAPLDPEGS

SEQ ID NO: 2812 - protein, 95 aa, Thermosynechococcus elongatus
ASVVPQERQQVARKHYPNYKVIVLNDDFNTFRHVAACLMKYIPNMTSDRAWELTNQVHYEGQAIVWVGPQEQAELYHEQLLRTGLTMAPLEPGGS

SEQ ID NO: 2813 - protein, 95 aa, Thermosynechococcus elongatus
ASVVPQERQQVARKHYPNYKVIVLNDDFNTFRHVAACLMKYIPNMTSDRAWELTNQVHYEGQAIVWVGPQEQAELYHEQLLRDGLTMAPLEPEGS

SEQ ID NO: 2814 - protein, 95 aa, Thermosynechococcus elongatus; identical to SEQ ID NO: 6

SEQ ID NO: 2815 - protein, 95 aa, Thermosynechococcus elongatus
ASVVPQERQQVARKHYPNYKVIVLNDDFNTFRHVAACLMKYIPNMTSDRAWELTNQVHYEGQAIVWVGPQEQAELYHEQLLRAGMTMAPLEPEGS

SEQ ID NO: 2816 - protein, 95 aa, Thermosynechococcus elongatus; identical to SEQ ID NO: 6

SEQ ID NO: 2817 - protein, 95 aa, Thermosynechococcus elongatus
ASVVPQERQQVARKHYPNYKVIVLNDDFNTFRHVAACLMKYIPNMTSDRAWELTNQVHYEGQAIVWVGPQEQAELYHEQLLRAGLTRAPLEPGGS

SEQ ID NO: 2818 - protein, 95 aa, Thermosynechococcus elongatus; identical to SEQ ID NO: 661

SEQ ID NO: 2819 - protein, 95 aa, Thermosynechococcus elongatus
ASVVPQERQQVARKHYPNYKVIVLNDDFNTFRHVAACLMKYIPNMTSDRAWELTNQVHYEGQAIVWVGPQEQAELYHEQLLRAGLTIAPLEPGGS

SEQ ID NO: 2820 - protein, 95 aa, Thermosynechococcus elongatus; identical to SEQ ID NO: 6

SEQ ID NO: 2821 - protein, 95 aa, Thermosynechococcus elongatus
ASVVPQERQQVARKHYPNYKVIVLNDDFNTFRHVAACLMKYIPNMTSDRAWELTNQVHYEGQAIVWVGPQEQAELYHEQLLRAGLTMATLEPEGS

SEQ ID NO: 2822 - protein, 95 aa, Thermosynechococcus elongatus
ASVVPQERQQVARKHYPNYKVIVLNDDFNTFRHVAACLMKYIPNMTSDRAWELTNQVHYEGQAIVWVGPQEQAELYHEQLLRAGLTMAQLEPEGS

SEQ ID NO: 2823 - protein, 95 aa, Thermosynechococcus elongatus; identical to SEQ ID NO: 66

SEQ ID NO: 2824 - protein, 95 aa, Thermosynechococcus elongatus
ASVVPQERQQVARKHYPNYKVIVLNDDFNTFRHVAACLMKYIPNMTSDRAWELTNQVHYEGQAIVWVGPQEQAELYHEQLLRAGLTMAPLEQEGS

SEQ ID NO: 2825 - protein, 95 aa, Thermosynechococcus elongatus
ASVVPQERQQVARKHYPNYKVIVLNDDFNTFRHVAACLMKYIPNMTSDRAWELTNQVHYEGQAIVWVGPQEQAELYHEQLLRAGLTMAPLEPDGS

SEQ ID NO: 2826 - protein, 95 aa, Thermosynechococcus elongatus
ASVVPQERQQVARKHYPNYKVIVLNDDFNTFRHVAACLMKYIPNMTSDRAWELTNQVHYEGQAIVWVGPQEQAELYHEQLLRAGLTMAPLEPVGS

SEQ ID NO: 2827 - protein, 92 aa, Thermosynechococcus elongatus
ASVVPQERQQVARKHYPNYKVIVLNDDFNTFRHVAACLMKYIPNMTSDRAWELTNQVHYEGQAIVWVGPQEQAELYHEQLLRAGLTMAPLEP

SEQ ID NO: 2828 - protein, 95 aa, Thermosynechococcus elongatus
ASVVPQERQQVARKHYPNYKVIVLNDDFNTFRHVAACLMKYIPNMTSDRAWELTNQVHYEGQAIVWVGPQEQAELYHEQLLRAGLTMAPLERGGS

SEQ ID NO: 2829 - protein, 95 aa, Thermosynechococcus elongatus
ASVVPQERQQVARKHYPNYKVIVLNDDFNTFRHVAACLMKYIPNMTSDRAWELTNQVHYEGQAIVWVGPQEQAELYHEQLLRAGLTMAPLEAEGS

SEQ ID NO: 2830 - protein, 95 aa, Thermosynechococcus elongatus
ASVVPQERQQVARKHYPNYKVIVLNDDFNTFRHVAACLMKYIPNMTSDRAWELTNQVHYEGQAIVWVGPQEQAELYHEQLLRAGLTMAPLDPEGS

SEQ ID NO: 2831 - protein, 95 aa, Thermosynechococcus elongatus
ASVVPQERQQVARKHYPNYKVIVLNDDFNTFRHVAACLMKYIPNMTSDRAWELTNQVHYEGQAIVWVGPQEQAELYHEQLLRAGLTMAPFEPEGS

SEQ ID NO: 2832 - protein, 95 aa, Thermosynechococcus elongatus
ASVVPQERQQVARKHYPNYKVIVLNDDFNTFRHVAACLMKYIPNMTSDRAWELTNQVHYEGQAIVWVGPQEQAELYHEQLLRAGLTIATLEPEGS

SEQ ID NO: 2833 - protein, 95 aa, Thermosynechococcus elongatus; identical to SEQ ID NO: 2770

SEQ ID NO: 2834 - protein, 95 aa, Thermosynechococcus elongatus
ASVVPQERQQVARKHYPNYKVIVLNDDFNTFRHVAACLMKYIPNMTSDRAWELTNQVHYEGQAIVWVGPQEQAELYHEQLLRAGLSMATLEPEGS

SEQ ID NO: 2835 - protein, 95 aa, Thermosynechococcus elongatus
ASVVPQERQQVARKHYPNYKVIVLNDDFNTFRHVAACLMKYIPNMTSDRAWELTNQVHYEGQAIVWVGPQEQAELYHEQLLRACLTMAPLEPEGS

SEQ ID NO: 2836 - protein, 95 aa, Thermosynechococcus elongatus
ASVVPQERQQVARKHYPNYKVIVLNDDFNTFRHVAACLMKYIPNMTSDRAWELTNQVHYEGQAIVWVGPQEQAELYHEQLLRVGLTMAPLEPEGS

SEQ ID NO: 2837 - protein, 81 aa, Thermosynechococcus elongatus
ASVVPQERQQVARKHYPNYKVIVLNDDFNTFRHVAACLMKYIPNMTSDRAWELTNQVHYEGQAIVWVGPQEQAELYHEQLL

SEQ ID NO: 2838 - protein, 95 aa, Thermosynechococcus elongatus
ASVVPQERQQVARKHYPNYKVIVLNDDFNTFRHVAACLMKYIPNMTSDRAWELTNQVHYEGQAIVWVGPQEQAELYHEQLFRAGLTMAPLEPEGS

SEQ ID NO: 2839 - protein, 90 aa, Thermosynechococcus elongatus
ASVVPQERQQVARKHYPNYKVIVLNDDFNTFRHVAACLMKYIPNMTSDRAWELTNQVHYEGQAIVWVGPQEQAELYHEQFLRAGLTMAPL

SEQ ID NO: 2840 - protein, 95 aa, Thermosynechococcus elongatus
ASVVPQERQQVARKHYPNYKVIVLNDDFNTFRHVAACLMKYIPNMTSDRAWELTNQVHYEGQAIVWVGPQEQAELYHEHLLRAGLTMAPLEPEGS

SEQ ID NO: 2841 - protein, 95 aa, Thermosynechococcus elongatus
ASVVPQERQQVARKHYPNYKVIVLNDDFNTFRHVAACLMKYIPNMTSDRAWELTNQVHYEGQAIVWVGPQEQAELYHEHLLRAGLTMAPLVPEGS

SEQ ID NO: 2842 - protein, 75 aa, Thermosynechococcus elongatus
ASVVPQERQQVARKHYPNYKVIVLNDDFNTFRHVAACLMKYIPNMTSDRAWELTNQVHYEGQAIVWVGPQEQAEL

SEQ ID NO: 2843 - protein, 95 aa, Thermosynechococcus elongatus; identical to SEQ ID NO: 6

SEQ ID NO: 2844 - protein, 95 aa, Thermosynechococcus elongatus
ASVVPQERQQVARKHYPNYKVIVLNDDFNTFRHVAACLMKYIPNMTSDRAWELTNQVHYEGQAIVWVGPQEQAELSHEQLLRAGLTMAPLEPEGS

SEQ ID NO: 2845 - protein, 95 aa, Thermosynechococcus elongatus
ASVVPQERQQVARKHYPNYKVIVLNDDFNTFRHVAACLMKYIPNMTSDRAWELTNQVHYEGQAIVWVGPQEQAGLYHEQLLRAGLTMAPLEPEGS

SEQ ID NO: 2846 - protein, 73 aa, Thermosynechococcus elongatus
ASVVPQERQQVARKHYPNYKVIVLNDDFNTFRHVAACLMKYIPNMTSDRAWELTNQVHYEGQAIVWVGPQEQA

SEQ ID NO: 2847 - protein, 95 aa, Thermosynechococcus elongatus
ASVVPQERQQVARKHYPNYKVIVLNDDFNTFRHVAACLMKYIPNMTSDRAWELTNQVHYEGQAIVWVGPQEQSELYHEQLLRAGLTMAPLEPEGS

SEQ ID NO: 2848 - protein, 95 aa, Thermosynechococcus elongatus
ASVVPQERQQVARKHYPNYKVIVLNDDFNTFRHVAACLMKYIPNMTSDRAWELTNQVHYEGQAIVWVGPQAQAELYHEQLLRAGLTMAPLEPGGS

SEQ ID NO: 2849 - protein, 95 aa, Thermosynechococcus elongatus
ASVVPQERQQVARKHYPNYKVIVLNDDFNTFRHVAACLMKYIPNMTSDRAWELTNQVHYEGQAIVWVGPQVQDELYHEQLLRTGLTMAPLEPEGS

SEQ ID NO: 2850 - protein, 95 aa, Thermosynechococcus elongatus
ASVVPQERQQVARKHYPNYKVIVLNDDFNTFRHVAACLMKYIPNMTSDRAWELTNQVHYEGQAIVWVGPQVQDELYHEQLLRAGLTMAPLEPEGS

SEQ ID NO: 2851 - protein, 95 aa, Thermosynechococcus elongatus; identical to SEQ ID NO: 9

SEQ ID NO: 2852 - protein, 95 aa, Thermosynechococcus elongatus; identical to SEQ ID NO: 3

SEQ ID NO: 2853 - protein, 95 aa, Thermosynechococcus elongatus; identical to SEQ ID NO: 3

SEQ ID NO: 2854 - protein, 95 aa, Thermosynechococcus elongatus
ASVVPQERQQVARKHYPNYKVIVLNDDFNTFRHVAACLMKYIPNMTSDRAWELTNQVHYEGQAIVWVGPQVQAEIYHEQLLRAGLTMAPLEPGGS

SEQ ID NO: 2855 - protein, 95 aa, Thermosynechococcus elongatus
ASVVPQERQQVARKHYPNYKVIVLNDDFNTFRHVAACLMKYIPNMTSDRAWELTNQVHYEGQAIVWVGPQVQAESYHEQLLRAGLTMAPLEPGGS

SEQ ID NO: 2856 - protein, 95 aa, Thermosynechococcus elongatus
ASVVPQERQQVARKHYPNYKVIVLNDDFNTFRHVAACLMKYIPNMTSDRAWELTNQVHYEGQAIVWVGPQVQAELHHEQLLRAGLTMAPLEPEGS

SEQ ID NO: 2857 - protein, 95 aa, Thermosynechococcus elongatus
ASVVPQERQQVARKHYPNYKVIVLNDDFNTFRHVAACLMKYIPNMTSDRAWELTNQVHYEGQAIVWVGPQVQAELHHEQLLRAGLTMAPLEPGGS

SEQ ID NO: 2858 - protein, 95 aa, Thermosynechococcus elongatus
ASVVPQERQQVARKHYPNYKVIVLNDDFNTFRHVAACLMKYIPNMTSDRAWELTNQVHYEGQAIVWVGPQVQAELDHEQLWRAGLTRAPLEPGGS

SEQ ID NO: 2859 - protein, 95 aa, Thermosynechococcus elongatus
ASVVPQERQQVARKHYPNYKVIVLNDDFNTFRHVAACLMKYIPNMTSDRAWELTNQVHYEGQAIVWVGPQVQAELDHEQLWRAGLTMAPLEPEGS

SEQ ID NO: 2860 - protein, 95 aa, Thermosynechococcus elongatus
ASVVPQERQQVARKHYPNYKVIVLNDDFNTFRHVAACLMKYIPNMTSDRAWELTNQVHYEGQAIVWVGPQVQAELYQEQLLRAGLTMAPLEPGGS

SEQ ID NO: 2861 - protein, 80 aa, Thermosynechococcus elongatus
ASVVPQERQQVARKHYPNYKVIVLNDDFNTFRHVAACLMKYIPNMTSDRAWELTNQVHYEGQAIVWVGPQVQAELYHNNC

SEQ ID NO: 2862 - protein, 95 aa, Thermosynechococcus elongatus
ASVVPQERQQVARKHYPNYKVIVLNDDFNTFRHVAACLMKYIPNMTSDRAWELTNQVHYEGQAIVWVGPQVQAELYHKQLLRAGLTMAPLEPEGS

SEQ ID NO: 2863 - protein, 95 aa, Thermosynechococcus elongatus
ASVVPQERQQVARKHYPNYKVIVLNDDFNTFRHVAACLMKYIPNMTSDRAWELTNQVHYEGQAIVWVGPQVQAELYHKQLLRAGLTMAPLEPGGS

SEQ ID NO: 2864 - protein, 95 aa, Thermosynechococcus elongatus
ASVVPQERQQVARKHYPNYKVIVLNDDFNTFRHVAACLMKYIPNMTSDRAWELTNQVHYEGQAIVWVGPQVQAELYHKQLLRAGLTMAPFEPEGS

SEQ ID NO: 2865 - protein, 95 aa, Thermosynechococcus elongatus
ASVVPQERQQVARKHYPNYKVIVLNDDFNTFRHVAACLMKYIPNMTSDRAWELTNQVHYEGQAIVWVGPQVQAELYHEKLLRAGLTMAPLEPEGS

SEQ ID NO: 2866 - protein, 95 aa, Thermosynechococcus elongatus
ASVVPQERQQVARKHYPNYKVIVLNDDFNTFRHVAACLMKYIPNMTSDRAWELTNQVHYEGQAIVWVGPQVQAELYHEQMLRAGLTMAPLEPGGS

SEQ ID NO: 2867 - protein, 95 aa, Thermosynechococcus elongatus
ASVVPQERQQVARKHYPNYKVIVLNDDFNTFRHVAACLMKYIPNMTSDRAWELTNQVHYEGQAIVWVGPQVQAELYHEQSLRAGLTMAPLEPGGS

SEQ ID NO: 2868 - protein, 95 aa, Thermosynechococcus elongatus; identical to SEQ ID NO: 3

SEQ ID NO: 2869 - protein, 95 aa, Thermosynechococcus elongatus; identical to SEQ ID NO: 3

SEQ ID NO: 2870 - protein, 95 aa, Thermosynechococcus elongatus
ASVVPQERQQVARKHYPNYKVIVLNDDFNTFRHVAACLMKYIPNMTSDRAWELTNQVHYEGQAIVWVGPQVQAELYHEQLVRAGLTMAPLEPEGS

SEQ ID NO: 2871 - protein, 80 aa, Thermosynechococcus elongatus
ASVVPQERQQVARKHYPNYKVIVLNDDFNTFRHVAACLMKYIPNMTSDRAWELTNQVHYEGQAIVWVGPQVQAELYHEQL

SEQ ID NO: 2872 - protein, 95 aa, Thermosynechococcus elongatus
ASVVPQERQQVARKHYPNYKVIVLNDDFNTFRHVAACLMKYIPNMTSDRAWELTNQVHYEGQAIVWVGPQVQAELYHEQLSRAGLTMAPLEPGGS

SEQ ID NO: 2873 - protein, 95 aa, Thermosynechococcus elongatus; identical to SEQ ID NO: 524

SEQ ID NO: 2874 - protein, 95 aa, Thermosynechococcus elongatus
ASVVPQERQQVARKHYPNYKVIVLNDDFNTFRHVAACLMKYIPNMTSDRAWELTNQVHYEGQAIVWVGPQVQAELYHEQLWRAGLTRAPLEPGGS

SEQ ID NO: 2875 - protein, 95 aa, Thermosynechococcus elongatus
ASVVPQERQQVARKHYPNYKVIVLNDDFNTFRHVAACLMKYIPNMTSDRAWELTNQVHYEGQAIVWVGPQVQAELYHEQLWRAGLTMAPLEPEGS

SEQ ID NO: 2876 - protein, 95 aa, Thermosynechococcus elongatus
ASVVPQERQQVARKHYPNYKVIVLNDDFNTFRHVAACLMKYIPNMTSDRAWELTNQVHYEGQAIVWVGPQVQAELYHEQLLKAGLTMAPLEPEGS

SEQ ID NO: 2877 - protein, 95 aa, Thermosynechococcus elongatus
ASVVPQERQQVARKHYPNYKVIVLNDDFNTFRHVAACLMKYIPNMTSDRAWELTNQVHYEGQAIVWVGPQVQAELYHEQLLRDGLTMAPLEPGGS

SEQ ID NO: 2878 - protein, 95 aa, Thermosynechococcus elongatus; identical to SEQ ID NO: 3

SEQ ID NO: 2879 - protein, 95 aa, Thermosynechococcus elongatus; identical to SEQ ID NO: 3

SEQ ID NO: 2880 - protein, 95 aa, Thermosynechococcus elongatus; identical to SEQ ID NO: 9

SEQ ID NO: 2881 - protein, 95 aa, Thermosynechococcus elongatus; identical to SEQ ID NO: 3

SEQ ID NO: 2882 - protein, 95 aa, Thermosynechococcus elongatus; identical to SEQ ID NO: 9

SEQ ID NO: 2883 - protein, 95 aa, Thermosynechococcus elongatus; identical to SEQ ID NO: 3

SEQ ID NO: 2884 - protein, 95 aa, Thermosynechococcus elongatus; identical to SEQ ID NO: 338

SEQ ID NO: 2885 - protein, 95 aa, Thermosynechococcus elongatus
ASVVPQERQQVARKHYPNYKVIVLNDDFNTFRHVAACLMKYIPNMTSDRAWELTNQVHYEGQAIVWVGPQVQAELYHEQLLRAGLTIDPLEPGGS

SEQ ID NO: 2886 - protein, 95 aa, Thermosynechococcus elongatus
ASVVPQERQQVARKHYPNYKVIVLNDDFNTFRHVAACLMKYIPNMTSDRAWELTNQVHYEGQAIVWVGPQVQAELYHEQLLRAGLTMDPLEPGGS

SEQ ID NO: 2887 - protein, 95 aa, Thermosynechococcus elongatus; identical to SEQ ID NO: 9

SEQ ID NO: 2888 - protein, 95 aa, Thermosynechococcus elongatus; identical to SEQ ID NO: 3

SEQ ID NO: 2889 - protein, 95 aa, Thermosynechococcus elongatus
ASVVPQERQQVARKHYPNYKVIVLNDDFNTFRHVAACLMKYIPNMTSDRAWELTNQVHYEGQAIVWVGPQVQAELYHEQLLRAGLTMAQLEPEGS

SEQ ID NO: 2890 - protein, 95 aa, Thermosynechococcus elongatus
ASVVPQERQQVARKHYPNYKVIVLNDDFNTFRHVAACLMKYIPNMTSDRAWELTNQVHYEGQAIVWVGPQVQAELYHEQLLRAGLTMAQLVPGGS

SEQ ID NO: 2891 - protein, 95 aa, Thermosynechococcus elongatus
ASVVPQERQQVARKHYPNYKVIVLNDDFNTFRHVAACLMKYIPNMTSDRAWELTNQVHYEGQAIVWVGPQVQAELYHEQLLRAGLTMAPLGPEGS

SEQ ID NO: 2892 - protein, 90 aa, Thermosynechococcus elongatus; identical to SEQ ID NO: 309

SEQ ID NO: 2893 - protein, 95 aa, Thermosynechococcus elongatus; identical to SEQ ID NO: 9

SEQ ID NO: 2894 - protein, 95 aa, Thermosynechococcus elongatus
ASVVPQERQQVARKHYPNYKVIVLNDDFNTFRHVAACLMKYIPNMTSDRAWELTNQVHYEGQAIVWVGPQVQAELYHEQLLRAGLTMAPVEPGGS

SEQ ID NO: 2895 - protein, 95 aa, Thermosynechococcus elongatus
ASVVPQERQQVARKHYPNYKVIVLNDDFNTFRHVAACLMKYIPNMTSDRAWELTNQVHYEGQAIVWVGPQVQAELYHEQLLRAGLTMAPWEPEGS

SEQ ID NO: 2896 - protein, 95 aa, Thermosynechococcus elongatus
ASVVPQERQQVARKHYPNYKVIVLNDDFNTFRHVAACLMKYIPNMTSDRAWELTNQVHYEGQAIVWVGPQVQAELYHEQLLRAGLTMAPLKPGGS

SEQ ID NO: 2897 - protein, 95 aa, Thermosynechococcus elongatus
ASVVPQERQQVARKHYPNYKVIVLNDDFNTFRHVAACLMKYIPNMTSDRAWELTNQVHYEGQAIVWVGPQVQAELYHEQLLRAGLTMAPLEQEGS

SEQ ID NO: 2898 - protein, 93 aa, Thermosynechococcus elongatus
ASVVPQERQQVARKHYPNYKVIVLNDDFNTFRHVAACLMKYIPNMTSDRAWELTNQVHYEGQAIVWVGPQVQAELYHEQLLRAGLTMAPLEPE

SEQ ID NO: 2899 - protein, 95 aa, Thermosynechococcus elongatus; identical to SEQ ID NO: 9

SEQ ID NO: 2900 - protein, 95 aa, Thermosynechococcus elongatus
ASVVPQERQQVARKHYPNYKVIVLNDDFNTFRHVAACLMKYIPNMTSDRAWELTNQVHYEGQAIVWVGPQVQAELYHEQLLRAGLTMAPLEPDGS

SEQ ID NO: 2901 - protein, 95 aa, Thermosynechococcus elongatus
ASVVPQERQQVARKHYPNYKVIVLNDDFNTFRHVAACLMKYIPNMTSDRAWELTNQVHYEGQAIVWVGPQVQAELYHEQLLRAGLTMAPLEPVGS

SEQ ID NO: 2902 - protein, 95 aa, Thermosynechococcus elongatus
ASVVPQERQQVARKHYPNYKVIVLNDDFNTFRHVAACLMKYIPNMTSDRAWELTNQVHYEGQAIVWVGPQVQAELYHEQLLRAGLTMAPLELGGS

SEQ ID NO: 2903 - protein, 95 aa, Thermosynechococcus elongatus; identical to SEQ ID NO: 9

SEQ ID NO: 2904 - protein, 95 aa, Thermosynechococcus elongatus
ASVVPQERQQVARKHYPNYKVIVLNDDFNTFRHVAACLMKYIPNMTSDRAWELTNQVHYEGQAIVWVGPQVQAELYHEQLLRAGLTMAPLVPGGS

SEQ ID NO: 2905 - protein, 90 aa, Thermosynechococcus elongatus; identical to SEQ ID NO: 309

SEQ ID NO: 2906 - protein, 95 aa, Thermosynechococcus elongatus
ASVVPQERQQVARKHYPNYKVIVLNDDFNTFRHVAACLMKYIPNMTSDRAWELTNQVHYEGQAIVWVGPQVQAELYHEQLLRAGLTMAPFEPEGS

SEQ ID NO: 2907 - protein, 95 aa, Thermosynechococcus elongatus; identical to SEQ ID NO: 9

SEQ ID NO: 2908 - protein, 95 aa, Thermosynechococcus elongatus; identical to SEQ ID NO: 3

SEQ ID NO: 2909 - protein, 95 aa, Thermosynechococcus elongatus
ASVVPQERQQVARKHYPNYKVIVLNDDFNTFRHVAACLMKYIPNMTSDRAWELTNQVHYEGQAIVWVGPQVQAELYHEQLLRAGLTMALLEPEGS

SEQ ID NO: 2910 - protein, 95 aa, Thermosynechococcus elongatus
ASVVPQERQQVARKHYPNYKVIVLNDDFNTFRHVAACLMKYIPNMTSDRAWELTNQVHYEGQAIVWVGPQVQAELYHEQLLRAGLTMASLEPEGS

SEQ ID NO: 2911 - protein, 95 aa, Thermosynechococcus elongatus
ASVVPQERQQVARKHYPNYKVIVLNDDFNTFRHVAACLMKYIPNMTSDRAWELTNQVHYEGQAIVWVGPQVQAELYHEQLLRAGLTMASLEPGGS

SEQ ID NO: 2912 - protein, 95 aa, Thermosynechococcus elongatus
ASVVPQERQQVARKHYPNYKVIVLNDDFNTFRHVAACLMKYIPNMTSDRAWELTNQVHYEGQAIVWVGPQVQAELYHEQLLRAGLTMGPLEPGGS

SEQ ID NO: 2913 - protein, 95 aa, Thermosynechococcus elongatus
ASVVPQERQQVARKHYPNYKVIVLNDDFNTFRHVAACLMKYIPNMTSDRAWELTNQVHYEGQAIVWVGPQVQAELYHEQLLRAGLTMVPLEPEGS

SEQ ID NO: 2914 - protein, 95 aa, Thermosynechococcus elongatus
ASVVPQERQQVARKHYPNYKVIVLNDDFNTFRHVAACLMKYIPNMTSDRAWELTNQVHYEGQAIVWVGPQVQAELYHEQLLRAGLTMVPLEPGGS

SEQ ID NO: 2915 - protein, 95 aa, Thermosynechococcus elongatus
ASVVPQERQQVARKHYPNYKVIVLNDDFNTFRHVAACLMKYIPNMTSDRAWELTNQVHYEGQAIVWVGPQVQAELYHEQLLRAGLTMSPLEPEGS

SEQ ID NO: 2916 - protein, 95 aa, Thermosynechococcus elongatus
ASVVPQERQQVARKHYPNYKVIVLNDDFNTFRHVAACLMKYIPNMTSDRAWELTNQVHYEGQAIVWVGPQVQAELYHEQLLRAGLTIAPLEPEGS

SEQ ID NO: 2917 - protein, 95 aa, Thermosynechococcus elongatus
ASVVPQERQQVARKHYPNYKVIVLNDDFNTFRHVAACLMKYIPNMTSDRAWELTNQVHYEGQAIVWVGPQVQAELYHEQLLRAGLTLATLEPGGS

SEQ ID NO: 2918 - protein, 95 aa, Thermosynechococcus elongatus
ASVVPQERQQVARKHYPNYKVIVLNDDFNTFRHVAACLMKYIPNMTSDRAWELTNQVHYEGQAIVWVGPQVQAELYHEQLLRAGLTLAPLVPGGS

SEQ ID NO: 2919 - protein, 95 aa, Thermosynechococcus elongatus
ASVVPQERQQVARKHYPNYKVIVLNDDFNTFRHVAACLMKYIPNMTSDRAWELTNQVHYEGQAIVWVGPQVQAELYHEQLLRAGLAMAPLEPEGS

SEQ ID NO: 2920 - protein, 95 aa, Thermosynechococcus elongatus
ASVVPQERQQVARKHYPNYKVIVLNDDFNTFRHVAACLMKYIPNMTSDRAWELTNQVHYEGQAIVWVGPQVQAELYHEQLLRAGLSMAPLEPGGS

SEQ ID NO: 2921 - protein, 95 aa, Thermosynechococcus elongatus
ASVVPQERQQVARKHYPNYKVIVLNDDFNTFRHVAACLMKYIPNMTSDRAWELTNQVHYEGQAIVWVGPQVQAELYHEQLLRAGFTMAPLERGGS

SEQ ID NO: 2922 - protein, 95 aa, Thermosynechococcus elongatus
ASVVPQERQQVARKHYPNYKVIVLNDDFNTFRHVAACLMKYIPNMTSDRAWELTNQVHYEGQAIVWVGPQVQAELYHEQLLRAVLTMAPLEPEGS

SEQ ID NO: 2923 - protein, 95 aa, Thermosynechococcus elongatus
ASVVPQERQQVARKHYPNYKVIVLNDDFNTFRHVAACLMKYIPNMTSDRAWELTNQVHYEGQAIVWVGPQVQAELYHEQLLRACLTIAPLEPGGS

SEQ ID NO: 2924 - protein, 95 aa, Thermosynechococcus elongatus
ASVVPQERQQVARKHYPNYKVIVLNDDFNTFRHVAACLMKYIPNMTSDRAWELTNQVHYEGQAIVWVGPQVQAELYHEQLLRSGLTMAPLEPGGS

SEQ ID NO: 2925 - protein, 95 aa, Thermosynechococcus elongatus; identical to SEQ ID NO: 3

SEQ ID NO: 2926 - protein, 95 aa, Thermosynechococcus elongatus
ASVVPQERQQVARKHYPNYKVIVLNDDFNTFRHVAACLMKYIPNMTSDRAWELTNQVHYEGQAIVWVGPQVQAELYHEQLLSAGLTMAPLEPEGS

SEQ ID NO: 2927 - protein, 95 aa, Thermosynechococcus elongatus
ASVVPQERQQVARKHYPNYKVIVLNDDFNTFRHVAACLMKYIPNMTSDRAWELTNQVHYEGQAIVWVGPQVQAELYHEQLLGAGLTMAPLEPGGS

SEQ ID NO: 2928 - protein, 81 aa, Thermosynechococcus elongatus
ASVVPQERQQVARKHYPNYKVIVLNDDFNTFRHVAACLMKYIPNMTSDRAWELTNQVHYEGQAIVWVGPQVQAELYHEQLL

SEQ ID NO: 2929 - protein, 95 aa, Thermosynechococcus elongatus
ASVVPQERQQVARKHYPNYKVIVLNDDFNTFRHVAACLMKYIPNMTSDRAWELTNQVHYEGQAIVWVGPQVQAELYHEQLFRAGLTMAPLEPGGS

SEQ ID NO: 2930 - protein, 95 aa, Thermosynechococcus elongatus
ASVVPQERQQVARKHYPNYKVIVLNDDFNTFRHVAACLMKYIPNMTSDRAWELTNQVHYEGQAIVWVGPQVQAELYHEQLFRAGLTMAPLEPEGS

SEQ ID NO: 2931 - protein, 95 aa, Thermosynechococcus elongatus
ASVVPQERQQVARKHYPNYKVIVLNDDFNTFRHVAACLMKYIPNMTSDRAWELTNQVHYEGQAIVWVGPQVQAELYHEQFLRAGLTMAPFEPGGS

SEQ ID NO: 2932 - protein, 95 aa, Thermosynechococcus elongatus
ASVVPQERQQVARKHYPNYKVIVLNDDFNTFRHVAACLMKYIPNMTSDRAWELTNQVHYEGQAIVWVGPQVQAELYHEHLLRAGLTIAPLEPGGS

SEQ ID NO: 2933 - protein, 95 aa, Thermosynechococcus elongatus
ASVVPQERQQVARKHYPNYKVIVLNDDFNTFRHVAACLMKYIPNMTSDRAWELTNQVHYEGQAIVWVGPQVQAELYHEHLLRAGLTRAPLEPGGS

SEQ ID NO: 2934 - protein, 95 aa, Thermosynechococcus elongatus
ASVVPQERQQVARKHYPNYKVIVLNDDFNTFRHVAACLMKYIPNMTSDRAWELTNQVHYEGQAIVWVGPQVQAELYHEHLLRAGLTMAPLEPEGS

SEQ ID NO: 2935 - protein, 95 aa, Thermosynechococcus elongatus
ASVVPQERQQVARKHYPNYKVIVLNDDFNTFRHVAACLMKYIPNMTSDRAWELTNQVHYEGQAIVWVGPQVQAELYHEPLLRAGLTMAPLEPGGS

SEQ ID NO: 2936 - protein, 95 aa, Thermosynechococcus elongatus
ASVVPQERQQVARKHYPNYKVIVLNDDFNTFRHVAACLMKYIPNMTSDRAWELTNQVHYEGQAIVWVGPQVQAELYHELLLRAGLTMAPLEPEGS

SEQ ID NO: 2937 - protein, 95 aa, Thermosynechococcus elongatus; identical to SEQ ID NO: 9

SEQ ID NO: 2938 - protein, 95 aa, Thermosynechococcus elongatus
ASVVPQERQQVARKHYPNYKVIVLNDDFNTFRHVAACLMKYIPNMTSDRAWELTNQVHYEGQAIVWVGPQVQAELYHDQLLRAGLTMATLDPGGS

SEQ ID NO: 2939 - protein, 93 aa, Thermosynechococcus elongatus
ASVVPQERQQVARKHYPNYKVIVLNDDFNTFRHVAACLMKYIPNMTSDRAWELTNQVHYEGQAIVWVGPQVQAELYHDQLLRAGLTMAPLEPE

SEQ ID NO: 2940 - protein, 95 aa, Thermosynechococcus elongatus
ASVVPQERQQVARKHYPNYKVIVLNDDFNTFRHVAACLMKYIPNMTSDRAWELTNQVHYEGQAIVWVGPQVQAELYHAQRLRAGLTMAPLEPGGS

SEQ ID NO: 2941 - protein, 95 aa, Thermosynechococcus elongatus
ASVVPQERQQVARKHYPNYKVIVLNDDFNTFRHVAACLMKYIPNMTSDRAWELTNQVHYEGQAIVWVGPQVQAELYHAQLLRAGLTMAPLEPGGS

SEQ ID NO: 2942 - protein, 95 aa, Thermosynechococcus elongatus
ASVVPQERQQVARKHYPNYKVIVLNDDFNTFRHVAACLMKYIPNMTSDRAWELTNQVHYEGQAIVWVGPQVQAELYHGQLLRAGLTMAPLEPGGS

SEQ ID NO: 2943 - protein, 95 aa, Thermosynechococcus elongatus
ASVVPQERQQVARKHYPNYKVIVLNDDFNTFRHVAACLMKYIPNMTSDRAWELTNQVHYEGQAIVWVGPQVQAELYHVQLLRAGLTMAPLEPGGS

SEQ ID NO: 2944 - protein, 95 aa, Thermosynechococcus elongatus
ASVVPQERQQVARKHYPNYKVIVLNDDFNTFRHVAACLMKYIPNMTSDRAWELTNQVHYEGQAIVWVGPQVQAELYQEPLLRAGLTMAPLEPGGS

SEQ ID NO: 2945 - protein, 95 aa, Thermosynechococcus elongatus; identical to SEQ ID NO: 9

SEQ ID NO: 2946 - protein, 95 aa, Thermosynechococcus elongatus; identical to SEQ ID NO: 3

SEQ ID NO: 2947 - protein, 95 aa, Thermosynechococcus elongatus
ASVVPQERQQVARKHYPNYKVIVLNDDFNTFRHVAACLMKYIPNMTSDRAWELTNQVHYEGQAIVWVGPQVQAELYPEQLLRAGLTMAPLERGGS

SEQ ID NO: 2948 - protein, 95 aa, Thermosynechococcus elongatus
ASVVPQERQQVARKHYPNYKVIVLNDDFNTFRHVAACLMKYIPNMTSDRAWELTNQVHYEGQAIVWVGPQVQAELYPAQLLRAGLTRAPLEPGGS

SEQ ID NO: 2949 - protein, 95 aa, Thermosynechococcus elongatus
ASVVPQERQQVARKHYPNYKVIVLNDDFNTFRHVAACLMKYIPNMTSDRAWELTNQVHYEGQAIVWVGPQVQAELYREQLLRAGLTMAPLEPGGS

SEQ ID NO: 2950 - protein, 95 aa, Thermosynechococcus elongatus
ASVVPQERQQVARKHYPNYKVIVLNDDFNTFRHVAACLMKYIPNMTSDRAWELTNQVHYEGQAIVWVGPQVQAELYLEQLLRAGLTMAPLEPGGS

SEQ ID NO: 2951 - protein, 95 aa, Thermosynechococcus elongatus
ASVVPQERQQVARKHYPNYKVIVLNDDFNTFRHVAACLMKYIPNMTSDRAWELTNQVHYEGQAIVWVGPQVQAELYLEQLLRAGLTMAPLVPGGS

SEQ ID NO: 2952 - protein, 95 aa, Thermosynechococcus elongatus; identical to SEQ ID NO: 9

SEQ ID NO: 2953 - protein, 95 aa, Thermosynechococcus elongatus
ASVVPQERQQVARKHYPNYKVIVLNDDFNTFRHVAACLMKYIPNMTSDRAWELTNQVHYEGQAIVWVGPQVQAELSHEQLLRAGLTLAPLEPGGS

SEQ ID NO: 2954 - protein, 95 aa, Thermosynechococcus elongatus
ASVVPQERQQVARKHYPNYKVIVLNDDFNTFRHVAACLMKYIPNMTSDRAWELTNQVHYEGQAIVWVGPQVQAELCHEQLLRAGLTMAPLEPEGS

SEQ ID NO: 2955 - protein, 95 aa, Thermosynechococcus elongatus
ASVVPQERQQVARKHYPNYKVIVLNDDFNTFRHVAACLMKYIPNMTSDRAWELTNQVHYEGQAIVWVGPQVQAEFYHEQLLRAGLTMAPLEPGGS

SEQ ID NO: 2956 - protein, 95 aa, Thermosynechococcus elongatus; identical to SEQ ID NO: 3

SEQ ID NO: 2957 - protein, 95 aa, Thermosynechococcus elongatus
ASVVPQERQQVARKHYPNYKVIVLNDDFNTFRHVAACLMKYIPNMTSDRAWELTNQVHYEGQAIVWVGPQVQADLYLEQLLRAGLTMAPLEPGGS

SEQ ID NO: 2958 - protein, 95 aa, Thermosynechococcus elongatus
ASVVPQERQQVARKHYPNYKVIVLNDDFNTFRHVAACLMKYIPNMTSDRAWELTNQVHYEGQAIVWVGPQVQGELYHEQLLRAGLTMAPLEPGGS

SEQ ID NO: 2959 - protein, 95 aa, Thermosynechococcus elongatus
ASVVPQERQQVARKHYPNYKVIVLNDDFNTFRHVAACLMKYIPNMTSDRAWELTNQVHYEGQAIVWVGPQVQSELYHEQLLRAGLTMAPLEPGGS

SEQ ID NO: 2960 - protein, 95 aa, Thermosynechococcus elongatus
ASVVPQERQQVARKHYPNYKVIVLNDDFNTFRHVAACLMKYIPNMTSDRAWELTNQVHYEGQAIVWVGPQVHAELYHEQLLRAGLTMAPLEPEGS

SEQ ID NO: 2961 - protein, 95 aa, Thermosynechococcus elongatus
ASVVPQERQQVARKHYPNYKVIVLNDDFNTFRHVAACLMKYIPNMTSDRAWELTNQVHYEGQAIVWVGPQVPAELYHEQLLRAGLTMAPLEPGGS

SEQ ID NO: 2962 - protein, 95 aa, Thermosynechococcus elongatus
ASVVPQERQQVARKHYPNYKVIVLNDDFNTFRHVAACLMKYIPNMTSDRAWELTNQVHYEGQAIVWVGPQVLAVLYHEKLLRAGLTMAPLEPGGS

SEQ ID NO: 2963 - protein, 81 aa, Thermosynechococcus elongatus
ASVVPQERQQVARKHYPNYKVIVLNDDFNTFRHVAACLMKYIPNMTSDRAWELTNQVHYEGQAIVWVGPQVQGVLYHEHLL

SEQ ID NO: 2964 - protein, 70 aa, Thermosynechococcus elongatus
ASVVPQERQQVARKHYPNYKVIVLNDDFNTFRHVAACLMKYIPNMTSDRAWELTNQVHYEGQAIVWVGPQ

SEQ ID NO: 2965 - protein, 95 aa, Thermosynechococcus elongatus
ASVVPQERQQVARKHYPNYKVIVLNDDFNTFRHVAACLMKYIPNMTSDRAWELTNQVHYEGQAIVWVGPQLQAELYHEQLLRAGLTMAPLEPGGS

SEQ ID NO: 2966 - protein, 95 aa, Thermosynechococcus elongatus; identical to SEQ ID NO: 3

SEQ ID NO: 2967 - protein, 74 aa, Thermosynechococcus elongatus
ASVVPQERQQVARKHYPNYKVIVLNDDFNTFRHVAACLMKYIPNMTSDRAWELTNQVHYEGQAIVWVGPPVQAE

SEQ ID NO: 2968 - protein, 95 aa, Thermosynechococcus elongatus
ASVVPQERQQVARKHYPNYKVIVLNDDFNTFRHVAACLMKYIPNMTSDRAWELTNQVHYEGQAIVWVGPREQAELNHEQLLRAGLTMAPLEPEGS

SEQ ID NO: 2969 - protein, 95 aa, Thermosynechococcus elongatus
ASVVPQERQQVARKHYPNYKVIVLNDDFNTFRHVAACLMKYIPNMTSDRAWELTNQVHYEGQAIVWVGPREQAELYHEQLLRAGLTMAPLEPEGS

SEQ ID NO: 2970 - protein, 95 aa, Thermosynechococcus elongatus; identical to SEQ ID NO: 2969

SEQ ID NO: 2971 - protein, 95 aa, Thermosynechococcus elongatus
ASVVPQERQQVARKHYPNYKVIVLNDDFNTFRHVAACLMKYIPNMTSDRAWELTNQVHYEGQAIVWVGPLVQAELYHEQLLRAGLTMAPLEPEGS

SEQ ID NO: 2972 - protein, 95 aa, Thermosynechococcus elongatus
ASVVPQERQQVARKHYPNYKVIVLNDDFNTFRHVAACLMKYIPNMTSDRAWELTNQVHYEGQAIVWVGPLVQAELYHEQLLRAGLTMAPLEPGGS

SEQ ID NO: 2973 - protein, 69 aa, Thermosynechococcus elongatus
ASVVPQERQQVARKHYPNYKVIVLNDDFNTFRHVAACLMKYIPNMTSDRAWELTNQVHYEGQAIVWVGP

SEQ ID NO: 2974 - protein, 95 aa, Thermosynechococcus elongatus; identical to SEQ ID NO: 6

SEQ ID NO: 2975 - protein, 95 aa, Thermosynechococcus elongatus; identical to SEQ ID NO: 3

SEQ ID NO: 2976 - protein, 95 aa, Thermosynechococcus elongatus
ASVVPQERQQVARKHYPNYKVIVLNDDFNTFRHVAACLMKYIPNMTSDRAWELTNQVHYEGQAIVWVGLQEQAELYHEQLLRAGLTMAPLEPEGS

SEQ ID NO: 2977 - protein, 95 aa, Thermosynechococcus elongatus
ASVVPQERQQVARKHYPNYKVIVLNDDFNTFRHVAACLMKYIPNMTSDRAWELTNQVHYEGQAIVWVGSQVQAELYHEQLLRAGLTMAPLEPGGS

SEQ ID NO: 2978 - protein, 75 aa, Thermosynechococcus elongatus
ASVVPQERQQVARKHYPNYKVIVLNDDFNTFRHVAACLMKYIPNMTSDRAWELTNQVHYEGQAIVWVVPQVQAEL

SEQ ID NO: 2979 - protein, 95 aa, Thermosynechococcus elongatus
ASVVPQERQQVARKHYPNYKVIVLNDDFNTFRHVAACLMKYIPNMTSDRAWELTNQVHYEGQAIVWVVPQVQAELYHEQLLRAGLTMAPLEPEGS

SEQ ID NO: 2980 - protein, 95 aa, Thermosynechococcus elongatus
ASVVPQERQQVARKHYPNYKVIVLNDDFNTFRHVAACLMKYIPNMTSDRAWELTNQVHYEGQAIVWVCPQEQAELYHEQLLRAGLTMAPLEPEGS

SEQ ID NO: 2981 - protein, 95 aa, Thermosynechococcus elongatus
ASVVPQERQQVARKHYPNYKVIVLNDDFNTFRHVAACLMKYIPNMTSDRAWELTNQVHYEGQAIVWVCPQVQAELYHEQLLRAGLTMAPLEPEGS

SEQ ID NO: 2982 - protein, 95 aa, Thermosynechococcus elongatus
ASVVPQERQQVARKHYPNYKVIVLNDDFNTFRHVAACLMKYIPNMTSDRAWELTNQVHYEGQAIVWFGPQVQAELYNEHLLRAGLTMAPLEPGGS

SEQ ID NO: 2983 - protein, 95 aa, Thermosynechococcus elongatus
ASVVPQERQQVARKHYPNYKVIVLNDDFNTFRHVAACLMKYIPNMTSDRAWELTNQVHYEGQAIVCVGPQEQAELYHEQLLRAGLTMAPLEPEGS

SEQ ID NO: 2984 - protein, 95 aa, Thermosynechococcus elongatus
ASVVPQERQQVARKHYPNYKVIVLNDDFNTFRHVAACLMKYIPNMTSDRAWELTNQVHYEGQAIVCVGPQVQSELYHEQLLRAGLTMAPLEPGGS

SEQ ID NO: 2985 - protein, 95 aa, Thermosynechococcus elongatus
ASVVPQERQQVARKHYPNYKVIVLNDDFNTFRHVAACLMKYIPNMTSDRAWELTNQVHYEGQAIVLVGPQEQAELYHEQLLRAGLTMAPLEPEGS

SEQ ID NO: 2986 - protein, 95 aa, Thermosynechococcus elongatus
ASVVPQERQQVARKHYPNYKVIVLNDDFNTFRHVAACLMKYIPNMTSDRAWELTNQVHYEGQAIVLVGPQVQAELYHEQLLRAGLTMAPLVPGGS

SEQ ID NO: 2987 - protein, 95 aa, Thermosynechococcus elongatus; identical to SEQ ID NO: 9

SEQ ID NO: 2988 - protein, 95 aa, Thermosynechococcus elongatus
ASVVPQERQQVARKHYPNYKVIVLNDDFNTFRHVAACLMKYIPNMTSDRAWELTNQVHYEGQAVVWVGPQVQAELYHEQLLRAGLTMAPLEPGGS

SEQ ID NO: 2989 - protein, 95 aa, Thermosynechococcus elongatus
ASVVPQERQQVARKHYPNYKVIVLNDDFNTFRHVAACLMKYIPNMTSDRAWELTNQVHYEGQAFVWVGPQVQAELYHEQLLRAGLTMAPLEPGGS

SEQ ID NO: 2990 - protein, 95 aa, Thermosynechococcus elongatus
ASVVPQERQQVARKHYPNYKVIVLNDDFNTFRHVAACLMKYIPNMTSDRAWELTNQVHYEGQSIVWVGPQVQAELYQEQLLRAGFTMAPLEPGGS

SEQ ID NO: 2991 - protein, 95 aa, Thermosynechococcus elongatus
ASVVPQERQQVARKHYPNYKVIVLNDDFNTFRHVAACLMKYIPNMTSDRAWELTNQVHYEGQSIVWVGPQEQAELYHEQLLRAGLTLAPLEPEGS

SEQ ID NO: 2992 - protein, 95 aa, Thermosynechococcus elongatus
ASVVPQERQQVARKHYPNYKVIVLNDDFNTFRHVAACLMKYIPNMTSDRAWELTNQVHYEGQSIVWVGPQVQAELYHEQLLRAGLTMAQLEPGGS

SEQ ID NO: 2993 - protein, 95 aa, Thermosynechococcus elongatus
ASVVPQERQQVARKHYPNYKVIVLNDDFNTFRHVAACLMKYIPNMTSDRAWELTNQVHYEGHAIVWVGPQEQAELYHEQLLRAGLTMAPLEPEGS

SEQ ID NO: 2994 - protein, 95 aa, Thermosynechococcus elongatus
ASVVPQERQQVARKHYPNYKVIVLNDDFNTFRHVAACLMKYIPNMTSDRAWELTNQVHYEGRAIVWVGPQEQAELYHEQLSRAGLSMAPLEPGGS

SEQ ID NO: 2995 - protein, 95 aa, Thermosynechococcus elongatus
ASVVPQERQQVARKHYPNYKVIVLNDDFNTFRHVAACLMKYIPNMTSDRAWELTNQVHYEGRAIVWVGPQEQAELYHEQLLRAGLTMSPLEPEGS

SEQ ID NO: 2996 - protein, 95 aa, Thermosynechococcus elongatus
ASVVPQERQQVARKHYPNYKVIVLNDDFNTFRHVAACLMKYIPNMTSDRAWELTNQVHYEGLAIVWVGPQEQAELYHEQLLRAGLTRASLEPEGS

SEQ ID NO: 2997 - protein, 95 aa, Thermosynechococcus elongatus
ASVVPQERQQVARKHYPNYKVIVLNDDFNTFRHVAACLMKYIPNMTSDRAWELTNQVHYEGLAIVWVGPQVQAELYHEQLLRAGLTMAPLEPEGS

SEQ ID NO: 2998 - protein, 95 aa, Thermosynechococcus elongatus
ASVVPQERQQVARKHYPNYKVIVLNDDFNTFRHVAACLMKYIPNMTSDRAWELTNQVHYEGLAIVWVGPQVQAELYHEQLLRAGLTIAPLEPGGS

SEQ ID NO: 2999 - protein, 95 aa, Thermosynechococcus elongatus
ASVVPQERQQVARKHYPNYKVIVLNDDFNTFRHVAACLMKYIPNMTSDRAWELTNQVHYEGLAIVWVGPQVQAELYHVHLLRAGLTMAPLDPGGS

SEQ ID NO: 3000 - protein, 77 aa, Thermosynechococcus elongatus
ASVVPQERQQVARKHYPNYKVIVLNDDFNTFRHVAACLMKYIPNMTSDRAWELTNQVHYEGLAIVWVGPQVQAELYH

SEQ ID NO: 3001 - protein, 61 aa, Thermosynechococcus elongatus
ASVVPQERQQVARKHYPNYKVIVLNDDFNTFRHVAACLMKYIPNMTSDRAWELTNQVHYEG

SEQ ID NO: 3002 - protein, 95 aa, Thermosynechococcus elongatus
ASVVPQERQQVARKHYPNYKVIVLNDDFNTFRHVAACLMKYIPNMTSDRAWELTNQVHYEVQAIVRVGPQEQAELYHKQLLRAGLTMAPLEPEGS

SEQ ID NO: 3003 - protein, 95 aa, Thermosynechococcus elongatus
ASVVPQERQQVARKHYPNYKVIVLNDDFNTFRHVAACLMKYIPNMTSDRAWELTNQVHYEVQAIVWVGPQVQAELYHEQLLRAGLTMAPLEPGGS

SEQ ID NO: 3004 - protein, 95 aa, Thermosynechococcus elongatus
ASVVPQERQQVARKHYPNYKVIVLNDDFNTFRHVAACLMKYIPNMTSDRAWELTNQVHYEVQAIFWVGPQEQSELYHEQLLRACLTIAQLETEGS

SEQ ID NO: 3005 - protein, 95 aa, Thermosynechococcus elongatus
ASVVPQERQQVARKHYPNYKVIVLNDDFNTFRHVAACLMKYIPNMTSDRAWELTNQVHYECQAIVWVGPQVQAELYHEQLLRAGLTMAPLEPEGS

SEQ ID NO: 3006 - protein, 95 aa, Thermosynechococcus elongatus
ASVVPQERQQVARKHYPNYKVIVLNDDFNTFRHVAACLMKYIPNMTSDRAWELTNQVHYECQAIVWVGPQEQAELYHEQLLRAGLTMAPLEPEGS

SEQ ID NO: 3007 - protein, 95 aa, Thermosynechococcus elongatus
ASVVPQERQQVARKHYPNYKVIVLNDDFNTFRHVAACLMKYIPNMTSDRAWELTNQVHYECQAIVWVGPQVQAELYHEQLLRAGLTMAPLVPGGS

SEQ ID NO: 3008 - protein, 95 aa, Thermosynechococcus elongatus
ASVVPQERQQVARKHYPNYKVIVLNDDFNTFRHVAACLMKYIPNMTSDRAWELTNQVHYECLAIVWVGPQVQAELYHEQLLRAGLTLAPLEPGGS

SEQ ID NO: 3009 - protein, 95 aa, Thermosynechococcus elongatus
ASVVPQERQQVARKHYPNYKVIVLNDDFNTFRHVAACLMKYIPNMTSDRAWELTNQVHYDGQAIVWVGPQEQAELYHEQLLRAGLTMAPLEPEGS

SEQ ID NO: 3010 - protein, 95 aa, Thermosynechococcus elongatus; identical to SEQ ID NO: 890

SEQ ID NO: 3011 - protein, 95 aa, Thermosynechococcus elongatus; identical to SEQ ID NO: 9

SEQ ID NO: 3012 - protein, 95 aa, Thermosynechococcus elongatus; identical to SEQ ID NO: 1325

SEQ ID NO: 3013 - protein, 95 aa, Thermosynechococcus elongatus
ASVVPQERQQVARKHYPNYKVIVLNDDFNTFRHVAACLMKYIPNMTSDRAWELTNQVHYAGQAIVWVGPQEQAELYHEQLVRAGLTMAPLEPEGS

SEQ ID NO: 3014 - protein, 95 aa, Thermosynechococcus elongatus
ASVVPQERQQVARKHYPNYKVIVLNDDFNTFRHVAACLMKYIPNMTSDRAWELTNQVHYAGQAIVWFGPQVQAELYHEQLLRAGLTMAPLEPEGS

SEQ ID NO: 3015 - protein, 95 aa, Thermosynechococcus elongatus
ASVVPQERQQVARKHYPNYKVIVLNDDFNTFRHVAACLMKYIPNMTSDRAWELTNQVHYGGQAIVWVGPQEQAELYHEQLLRAGLTMAPLEPEGS

SEQ ID NO: 3016 - protein, 95 aa, Thermosynechococcus elongatus; identical to SEQ ID NO: 38

SEQ ID NO: 3017 - protein, 95 aa, Thermosynechococcus elongatus
ASVVPQERQQVARKHYPNYKVIVLNDDFNTFRHVAACLMKYIPNMTSDRAWELTNQVHYGGRAIVWVGPQEQAELNQEQLLRAGLTMAPLEPEGS

SEQ ID NO: 3018 - protein, 75 aa, Thermosynechococcus elongatus
ASVVPQERQQVARKHYPNYKVIVLNDDFNTFRHVAACLMKYIPNMTSDRAWELTNQVHYGGRAIVWVGPQEQAEL

SEQ ID NO: 3019 - protein, 95 aa, Thermosynechococcus elongatus; identical to SEQ ID NO: 38

SEQ ID NO: 3020 - protein, 95 aa, Thermosynechococcus elongatus
ASVVPQERQQVARKHYPNYKVIVLNDDFNTFRHVAACLMKYIPNMTSDRAWELTNQVHYGGRAIVWVGPQEQAELYHEQLLRAGLTRAPLEPEGS

SEQ ID NO: 3021 - protein, 95 aa, Thermosynechococcus elongatus
ASVVPQERQQVARKHYPNYKVIVLNDDFNTFRHVAACLMKYIPNMTSDRAWELTNQVHYGGRAIVWVGPQEQAELYHEQLLRAGLTMAPLETEGS

SEQ ID NO: 3022 - protein, 95 aa, Thermosynechococcus elongatus; identical to SEQ ID NO: 1328

SEQ ID NO: 3023 - protein, 95 aa, Thermosynechococcus elongatus
ASVVPQERQQVARKHYPNYKVIVLNDDFNTFRHVAACLMKYIPNMTSDRAWELTNQVHYGGRAIVWVGPQEQAELYHEQLLRAGLTLAPLEPEGS

SEQ ID NO: 3024 - protein, 95 aa, Thermosynechococcus elongatus
ASVVPQERQQVARKHYPNYKVIVLNDDFNTFRHVAACLMKYIPNMTSDRAWELTNQVHYGGRAIVWVGPQEQAELYHELLLRAGLTMAPLEPEGS

SEQ ID NO: 3025 - protein, 95 aa, Thermosynechococcus elongatus
ASVVPQERQQVARKHYPNYKVIVLNDDFNTFRHVAACLMKYIPNMTSDRAWELTNQVHYGGRAIVWVGPQVQAELYHEQLLRAGLTMAPLEPEGS

SEQ ID NO: 3026 - protein, 95 aa, Thermosynechococcus elongatus
ASVVPQERQQVARKHYPNYKVIVLNDDFNTFRHVAACLMKYIPNMTSDRAWELTNQVHYGGLAIVWVGPQEQAELYHEQLLRAGLTMAPLEPVGS

SEQ ID NO: 3027 - protein, 95 aa, Thermosynechococcus elongatus; identical to SEQ ID NO: 892

SEQ ID NO: 3028 - protein, 95 aa, Thermosynechococcus elongatus
ASVVPQERQQVARKHYPNYKVIVLNDDFNTFRHVAACLMKYIPNMTSDRAWELTNQVHYVGQAIVWVGPQVQAELYLEQLLRAGLTMAPLEPGGS

SEQ ID NO: 3029 - protein, 95 aa, Thermosynechococcus elongatus
ASVVPQERQQVARKHYPNYKVIVLNDDFNTFRHVAACLMKYIPNMTSDRAWELTNQVHYVGQAIVWVGPQEQAELYHEQWLRAGLTMAPLEPKGS

SEQ ID NO: 3030 - protein, 95 aa, Thermosynechococcus elongatus
ASVVPQERQQVARKHYPNYKVIVLNDDFNTFRHVAACLMKYIPNMTSDRAWELTNQVHYVGQAIVWVGPQEQAELYHEQLLRAGLTMAPLVPEGS

SEQ ID NO: 3031 - protein, 95 aa, Thermosynechococcus elongatus
ASVVPQERQQVARKHYPNYKVIVLNDDFNTFRHVAACLMKYIPNMTSDRAWELTNQVHYVGQAIVWVGPQEQAELYHEHLLRAGLTMAPLEPEGS

SEQ ID NO: 3032 - protein, 95 aa, Thermosynechococcus elongatus
ASVVPQERQQVARKHYPNYKVIVLNDDFNTFRHVAACLMKYIPNMTSDRAWELTNQVHYVGQSIVWVGPQVQAELFHEQLLRAGLTMAPLEPGGS

SEQ ID NO: 3033 - protein, 95 aa, Thermosynechococcus elongatus
ASVVPQERQQVARKHYPNYKVIVLNDDFNTFRHVAACLMKYIPNMTSDRAWELTNQVHYVGLAIVWVGPQVQAELYHEQLLRAGLTMAPLEPEGS

SEQ ID NO: 3034 - protein, 59 aa, Thermosynechococcus elongatus; identical to SEQ ID NO: 530

SEQ ID NO: 3035 - protein, 95 aa, Thermosynechococcus elongatus; identical to SEQ ID NO: 3

SEQ ID NO: 3036 - protein, 95 aa, Thermosynechococcus elongatus
ASVVPQERQQVARKHYPNYKVIVLNDDFNTFRHVAACLMKYIPNMTSDRAWELTNQVHSEGQAIVWVGPQEQAELYHEQLLRAGLTMAPLEPEGS

SEQ ID NO: 3037 - protein, 95 aa, Thermosynechococcus elongatus
ASVVPQERQQVARKHYPNYKVIVLNDDFNTFRHVAACLMKYIPNMTSDRAWELTNQVHSEGQAIVWVGPQGQAELDHEQLLRAGLTMAPLEPGGS

SEQ ID NO: 3038 - protein, 95 aa, Thermosynechococcus elongatus
ASVVPQERQQVARKHYPNYKVIVLNDDFNTFRHVAACLMKYIPNMTSDRAWELTNQVHSEGQAIVWVGPQVQAELYHEQLLRAGLTMAPLEPEGS

SEQ ID NO: 3039 - protein, 95 aa, Thermosynechococcus elongatus
ASVVPQERQQVARKHYPNYKVIVLNDDFNTFRHVAACLMKYIPNMTSDRAWELTNQVHSEGQAIVWVGPQVHAELYHEQLLRAGLTMAPLDPGGS

SEQ ID NO: 3040 - protein, 95 aa, Thermosynechococcus elongatus
ASVVPQERQQVARKHYPNYKVIVLNDDFNTFRHVAACLMKYIPNMTSDRAWELTNQVHCEGQAIVWVGPQEQAELYHEQLLRAGLTMAPLEPEGS

SEQ ID NO: 3041 - protein, 95 aa, Thermosynechococcus elongatus
ASVVPQERQQVARKHYPNYKVIVLNDDFNTFRHVAACLMKYIPNMTSDRAWELTNQVHFEGQAIVWVGPQVQAELYHEQLLRAGLTMAPFEPGGS

SEQ ID NO: 3042 - protein, 95 aa, Thermosynechococcus elongatus
ASVVPQERQQVARKHYPNYKVIVLNDDFNTFRHVAACLMKYIPNMTSDRAWELTNQVHFEGQAIVWVGPQVQAELYHEQLLRAGLTLAPLERGGS

SEQ ID NO: 3043 - protein, 95 aa, Thermosynechococcus elongatus
ASVVPQERQQVARKHYPNYKVIVLNDDFNTFRHVAACLMKYIPNMTSDRAWELTNQVHFEGQAIVWVGPQVQAVLYHEQLLRAGLTMATLEPGGS

SEQ ID NO: 3044 - protein, 95 aa, Thermosynechococcus elongatus
ASVVPQERQQVARKHYPNYKVIVLNDDFNTFRHVAACLMKYIPNMTSDRAWELTNQVHFEGQAIVWVGPLEQAELYHEHLLRAGLTMAPLEPEGS

SEQ ID NO: 3045 - protein, 95 aa, Thermosynechococcus elongatus
ASVVPQERQQVARKHYPNYKVIVLNDDFNTFRHVAACLMKYIPNMTSDRAWELTNQVHFEGQSIVWVGPQVQAELYQEQLLRAGLTMAPLEPGGS

SEQ ID NO: 3046 - protein, 95 aa, Thermosynechococcus elongatus
ASVVPQERQQVARKHYPNYKVIVLNDDFNTFRHVAACLMKYIPNMTSDRAWELTNQVHFEGLAIVWVGPQVQAELYHEQLLRAGLTMAPLEPGGS

SEQ ID NO: 3047 - protein, 75 aa, Thermosynechococcus elongatus
ASVVPQERQQVARKHYPNYKVIVLNDDFNTFRHVAACLMKYIPNMTSDRAWELTNQVHFECLAIVWVGPQEQAEL

SEQ ID NO: 3048 - protein, 95 aa, Thermosynechococcus elongatus
ASVVPQERQQVARKHYPNYKVIVLNDDFNTFRHVAACLMKYIPNMTSDRAWELTNQVHFLGQAIVWVGPQVQAEFNLEQLLRAGLTMAPLEPEGS

SEQ ID NO: 3049 - protein, 95 aa, Thermosynechococcus elongatus
ASVVPQERQQVARKHYPNYKVIVLNDDFNTFRHVAACLMKYIPNMTSDRAWELTNQVRYEGQAIVWVGPQVQAELYHEQLLRAGLTMAPLEPGGS

SEQ ID NO: 3050 - protein, 95 aa, Thermosynechococcus elongatus
ASVVPQERQQVARKHYPNYKVIVLNDDFNTFRHVAACLMKYIPNMTSDRAWELTNQVLYEGQAIVWVGPQEQAELYHEQLLRAGLTMAPLEPEGS

SEQ ID NO: 3051 - protein, 95 aa, Thermosynechococcus elongatus
ASVVPQERQQVARKHYPNYKVIVLNDDFNTFRHVAACLMKYIPNMTSDRAWELTNQVLYEGQAIVWVGPQVQAELYHEQLWRAGLTMAPLEPGGS

SEQ ID NO: 3052 - protein, 95 aa, Thermosynechococcus elongatus
ASVVPQERQQVARKHYPNYKVIVLNDDFNTFRHVAACLMKYIPNMTSDRAWELTNQVLYEGQAIVWVGPQVQAELYHEQLLRAGLTMAPFEPGGS

SEQ ID NO: 3053 - protein, 95 aa, Thermosynechococcus elongatus
ASVVPQERQQVARKHYPNYKVIVLNDDFNTFRHVAACLMKYIPNMTSDRAWELTNQVLYEGQAIVWVGPQVQAELYHEHLLRAGLTMAPLEPGGS

SEQ ID NO: 3054 - protein, 95 aa, Thermosynechococcus elongatus
ASVVPQERQQVARKHYPNYKVIVLNDDFNTFRHVAACLMKYIPNMTSDRAWELTNQVLYEGQAIVWVGPQVQAVLYHVQLLRAGLTMAPLERGGS

SEQ ID NO: 3055 - protein, 95 aa, Thermosynechococcus elongatus
ASVVPQERQQVARKHYPNYKVIVLNDDFNTFRHVAACLMKYIPNMTSDRAWELTNQVLYEGQAIVWVGPLVQAELYHEQLLRAGLTMAPLEPGGS

SEQ ID NO: 3056 - protein, 95 aa, Thermosynechococcus elongatus
ASVVPQERQQVARKHYPNYKVIVLNDDFNTFRHVAACLMKYIPNMTSDRAWELTNQVLYVGLAIVWVGPQVQAVLYHVHLLRAGLTMVPLEPDGS

SEQ ID NO: 3057 - protein, 95 aa, Thermosynechococcus elongatus
ASVVPQERQQVARKHYPNYKVIVLNDDFNTFRHVAACLMKYIPNMTSDRAWELTNQVLFEGQAIVWVGPQVQAELYHEQLLRAGLTMAPLEPGGS

SEQ ID NO: 3058 - protein, 95 aa, Thermosynechococcus elongatus
ASVVPQERQQVARKHYPNYKVIVLNDDFNTFRHVAACLMKYIPNMTSDRAWELTNQVLFEGLAIVWVGPLELAELYHELFLRAGLTMAPLEPGGS

SEQ ID NO: 3059 - protein, 95 aa, Thermosynechococcus elongatus
ASVVPQERQQVARKHYPNYKVIVLNDDFNTFRHVAACLMKYIPNMTSDRAWELTNQVYYKGQAIVWVGPQEQAELNHEQLLRAGLTMAPLEPEGS

SEQ ID NO: 3060 - protein, 95 aa, Thermosynechococcus elongatus
ASVVPQERQQVARKHYPNYKVIVLNDDFNTFRHVAACLMKYIPNMTSDRAWELTNQFHYKGQAIVWVGPQEQAELNHEQLLRAGLTMAPLEPGGS

SEQ ID NO: 3061 - protein, 95 aa, Thermosynechococcus elongatus
ASVVPQERQQVARKHYPNYKVIVLNDDFNTFRHVAACLMKYIPNMTSDRAWELTNQFHYEGQAIVWVGPQEQAELYHEQLLRAGLTLAPLEPEGS

SEQ ID NO: 3062 - protein, 95 aa, Thermosynechococcus elongatus
ASVVPQERQQVARKHYPNYKVIVLNDDFNTFRHVAACLMKYIPNMTSDRAWELTNQFHYEGQAIVWVGPQVQAELYHEQLLRAGLTMAPLEPGGS

SEQ ID NO: 3063 - protein, 95 aa, Thermosynechococcus elongatus; identical to SEQ ID NO: 675

SEQ ID NO: 3064 - protein, 95 aa, Thermosynechococcus elongatus
ASVVPQERQQVARKHYPNYKVIVLNDDFNTFRHVAACLMKYIPNMTSDRAWELTNHVHYEGQSIVWVGPQVQAELYHELLLRAGLTMAPLEPGGS

SEQ ID NO: 3065 - protein, 95 aa, Thermosynechococcus elongatus; identical to SEQ ID NO: 675

SEQ ID NO: 3066 - protein, 95 aa, Thermosynechococcus elongatus
ASVVPQERQQVARKHYPNYKVIVLNDDFNTFRHVAACLMKYIPNMTSDRAWELTNHVHYEGQAIVWVGPQEQAELYHEHLLRAGLTMAPLEREGS

SEQ ID NO: 3067 - protein, 75 aa, Thermosynechococcus elongatus
ASVVPQERQQVARKHYPNYKVIVLNDDFNTFRHVAACLMKYIPNMTSDRAWELTNHVHYVGQSIVWVGPQVQAEL

SEQ ID NO: 3068 - protein, 95 aa, Thermosynechococcus elongatus
ASVVPQERQQVARKHYPNYKVIVLNDDFNTFRHVAACLMKYIPNMTSDRAWELTNHVHYVGLAIVWVGPQVQAELYHEQLLRAGLTMAPLEPGGS

SEQ ID NO: 3069 - protein, 95 aa, Thermosynechococcus elongatus
ASVVPQERQQVARKHYPNYKVIVLNDDFNTFRHVAACLMKYIPNMTSDRAWELTNHVLYEGQAIVWVGPLVQAELYHEQLLRAGLTMAPLEPGGS

SEQ ID NO: 3070 - protein, 95 aa, Thermosynechococcus elongatus
ASVVPQERQQVARKHYPNYKVIVLNDDFNTFRHVAACLMKYIPNMTSDRAWELTNHVLYEGQAIVWVGPQVQAELYLDQLLRAGLTMAPLVPGGS

SEQ ID NO: 3071 - protein, 95 aa, Thermosynechococcus elongatus
ASVVPQERQQVARKHYPNYKVIVLNDDFNTFRHVAACLMKYIPNMTSDRAWELTNPVHYEGQAIVWVGPQVQAELYHEQLLRAGLTMAPLEPGGS

SEQ ID NO: 3072 - protein, 95 aa, Thermosynechococcus elongatus
ASVVPQERQQVARKHYPNYKVIVLNDDFNTFRHVAACLMKYIPNMTSDRAWELTNRVHYEGQAIVWVGPQVQAELYHEQLLRAGLTMAPLEPKGS

SEQ ID NO: 3073 - protein, 95 aa, Thermosynechococcus elongatus
ASVVPQERQQVARKHYPNYKVIVLNDDFNTFRHVAACLMKYIPNMTSDRAWELTNRVHYEGQAIVWVGPQVQAELYHEQLLRAGLTMAPLEPGGS

SEQ ID NO: 3074 - protein, 95 aa, Thermosynechococcus elongatus
ASVVPQERQQVARKHYPNYKVIVLNDDFNTFRHVAACLMKYIPNMTSDRAWELTNLVHYEAQAIVWVGPHVQAELYHEQLLRAGLPMAPLEPGGS

SEQ ID NO: 3075 - protein, 55 aa, Thermosynechococcus elongatus
ASVVPQERQQVARKHYPNYKVIVLNDDFNTFRHVAACLMKYIPNMTSDRAWELTN

SEQ ID NO: 3076 - protein, 95 aa, Thermosynechococcus elongatus
ASVVPQERQQVARKHYPNYKVIVLNDDFNTFRHVAACLMKYIPNMTSDRAWELTNQVHYKGQATVWVGPQKQAELYHEQLLRAGLTMAPLEPEGS

SEQ ID NO: 3077 - protein, 95 aa, Thermosynechococcus elongatus; identical to SEQ ID NO: 3

SEQ ID NO: 3078 - protein, 95 aa, Thermosynechococcus elongatus; identical to SEQ ID NO: 38

SEQ ID NO: 3079 - protein, 55 aa, Thermosynechococcus elongatus; identical to SEQ ID NO: 3075

SEQ ID NO: 3080 - protein, 95 aa, Thermosynechococcus elongatus
ASVVPQERQQVARKHYPNYKVIVLNDDFNTFRHVAACLMKYIPNMTSDRAWELTSQVHYEGQAIVWVGPQVQAELYHEQLLRAGLTMAPLEPGGS

SEQ ID NO: 3081 - protein, 95 aa, Thermosynechococcus elongatus
ASVVPQERQQVARKHYPNYKVIVLNDDFNTFRHVAACLMKYIPNMTSDRAWELTHQVHYEGQAIVWVGPQVQAELYHEQLLRAGLTMAPLEPEGS

SEQ ID NO: 3082 - protein, 95 aa, Thermosynechococcus elongatus
ASVVPQERQQVARKHYPNYKVIVLNDDFNTFRHVAACLMKYIPNMTSDRAWELTDQVHYEGQAIVWVGPQVQAELYHEQLLRAGLTMAPLEPEGS

SEQ ID NO: 3083 - protein, 95 aa, Thermosynechococcus elongatus
ASVVPQERQQVARKHYPNYKVIVLNDDFNTFRHVAACLMKYIPNMTSDRAWELTYQVHYEGQAIVWVGPQVQAELYHEQLLRAGLTMAPLEPGGS

SEQ ID NO: 3084 - protein, 95 aa, Thermosynechococcus elongatus
ASVVPQERQQVARKHYPNYKVIVLNDDFNTFRHVAACLMKYIPNMTSDRAWELSNQVHYEGQAIVWVGPQEQAELYHEQLLRAGLTMAPFEPEGS

SEQ ID NO: 3085 - protein, 95 aa, Thermosynechococcus elongatus
ASVVPQERQQVARKHYPNYKVIVLNDDFNTFRHVAACLMKYIPNMTSDRAWELINQVHYEGQAIVWVGPQEQAELYHEQLLRAGLTMAPLEPEGS

SEQ ID NO: 3086 - protein, 95 aa, Thermosynechococcus elongatus
ASVVPQERQQVARKHYPNYKVIVLNDDFNTFRHVAACLMKYIPNMTSDRAWELANQVHYEGQAIVWVGPQVQAELYHEQLLRAGLTMAPLEPGGS

SEQ ID NO: 3087 - protein, 95 aa, Thermosynechococcus elongatus
ASVVPQERQQVARKHYPNYKVIVLNDDFNTFRHVAACLMKYIPNMTSDRAWELANQVHYEGQAIVLVGPQVQAELYHEQLLRAGLTMAPLEPGGS

SEQ ID NO: 3088 - protein, 95 aa, Thermosynechococcus elongatus
ASVVPQERQQVARKHYPNYKVIVLNDDFNTFRHVAACLMKYIPNMTSDRAWELANQVHYGGRAIVWVGPQEQAELYHEQLLRAGLTMAPLEPEGS

SEQ ID NO: 3089 - protein, 95 aa, Thermosynechococcus elongatus
ASVVPQERQQVARKHYPNYKVIVLNDDFNTFRHVAACLMKYIPNMTSDRAWELSNQVHYEGQAIVWVGPQVQAELYHEQLLRAGLTMAPLEPEGS

SEQ ID NO: 3090 - protein, 95 aa, Thermosynechococcus elongatus
ASVVPQERQQVARKHYPNYKVIVLNDDFNTFRHVAACLMKYIPNMTSDRAWEFTNQVHYEGQAIVWVGPQEQAELYHEQLLRAGLTMAPLEPGGS

SEQ ID NO: 3091 - protein, 95 aa, Thermosynechococcus elongatus
ASVVPQERQQVARKHYPNYKVIVLNDDFNTFRHVAACLMKYIPNMTSDRAWEFTNQVHYEGQAIVWVGPQVQAELYHEQLLRAGLTMAPLEPEGS

SEQ ID NO: 3092 - protein, 95 aa, Thermosynechococcus elongatus
ASVVPQERQQVARKHYPNYKVIVLNDDFNTFRHVAACLMKYIPNMTSDRAWDLTNQVHYEGQAIVWVGPQEQAELYHEQLLRAGLTMAPLEPEGS

SEQ ID NO: 3093 - protein, 95 aa, Thermosynechococcus elongatus
ASVVPQERQQVARKHYPNYKVIVLNDDFNTFRHVAACLMKYIPNMTSDRAWDLTNQVHLEGLAIVWVGPQVQAELYHEQLLRAGLTRAPLEPGGS

SEQ ID NO: 3094 - protein, 95 aa, Thermosynechococcus elongatus
ASVVPQERQQVARKHYPNYKVIVLNDDFNTFRHVAACLMKYIPNMTSDRAWELTNRVHYEGQAIVWVGPQVQAELYHEQLLRAGLTMAPLEPEGS

SEQ ID NO: 3095 - protein, 95 aa, Thermosynechococcus elongatus
ASVVPQERQQVARKHYPNYKVIVLNDDFNTFRHVAACLMKYIPNMTSDRAWDLTNQVHYVGQAIVWVGPQVQAELYHEQLLRAGLTMAPLEPEGS

SEQ ID NO: 3096 - protein, 95 aa, Thermosynechococcus elongatus
ASVVPQERQQVARKHYPNYKVIVLNDDFNTFRHVAACLMKYIPNMTSDRAWDLTNQVLLEGLAIVCVGPLVVAVLYLELFLRAGLTMAPLVPGGS

SEQ ID NO: 3097 - protein, 95 aa, Thermosynechococcus elongatus
ASVVPQERQQVARKHYPNYKVIVLNDDFNTFRHVAACLMKYIPNMTSDRAWVLTNQVHYEGQAIVWVGPQVQAELYHEQLLRAGLTMAPLEPGGS

SEQ ID NO: 3098 - protein, 51 aa, Thermosynechococcus elongatus; identical to SEQ ID NO: 894

SEQ ID NO: 3099 - protein, 51 aa, Thermosynechococcus elongatus; identical to SEQ ID NO: 894

SEQ ID NO: 3100 - protein, 95 aa, Thermosynechococcus elongatus
ASVVPQERQQVARKHYPNYKVIVLNDDFNTFRHVAACLMKYIPNMTSDRACELTNQVHYEGKAIVWVCPQLQAELYHEQLLRAGLTMAPLEPGGS

SEQ ID NO: 3101 - protein, 95 aa, Thermosynechococcus elongatus
ASVVPQERQQVARKHYPNYKVIVLNDDFNTFRHVAACLMKYIPNMTSDRACELTNQVHYEGQAIVWVGPQEQAELYHEQLLRAGLTMAPLEPEGS

SEQ ID NO: 3102 - protein, 95 aa, Thermosynechococcus elongatus
ASVVPQERQQVARKHYPNYKVIVLNDDFNTFRHVAACLMKYIPNMTSDRACELTNQVHYEGQAIVWVGPQVQAELYHEHLLRAGLTMAPLEPGGS

SEQ ID NO: 3103 - protein, 95 aa, Thermosynechococcus elongatus
ASVVPQERQQVARKHYPNYKVIVLNDDFNTFRHVAACLMKYIPNMTSDRALELTNQVHYEGQAIVWVGPQEQAELNHEQLLRAGLTMAPLEPEGS

SEQ ID NO: 3104 - protein, 95 aa, Thermosynechococcus elongatus
ASVVPQERQQVARKHYPNYKVIVLNDDFNTFRHVAACLMKYIPNMTSDRALELTNQVHYEGQAIVWVGPQEQAELYHEQLLRAGLTMAPLEPEGS

SEQ ID NO: 3105 - protein, 95 aa, Thermosynechococcus elongatus; identical to SEQ ID NO: 3104

SEQ ID NO: 3106 - protein, 95 aa, Thermosynechococcus elongatus; identical to SEQ ID NO: 1339

SEQ ID NO: 3107 - protein, 95 aa, Thermosynechococcus elongatus
ASVVPQERQQVARKHYPNYKVIVLNDDFNTFRHVAACLMKYIPNMTSDRALELANQVHYEGQAIVWVGPQVQAELYHEQLLRAGLTMAPLEPGGS

SEQ ID NO: 3108 - protein, 95 aa, Thermosynechococcus elongatus
ASVVPQERQQVARKHYPNYKVIVLNDDFNTFRHVAACLMKYIPNMTSDRSWELTNQVHYEGQAIVWVGPQEQAELYHEQLLRAGLTMAPLEPEGS

SEQ ID NO: 3109 - protein, 95 aa, Thermosynechococcus elongatus
ASVVPQERQQVARKHYPNYKVIVLNDDFNTFRHVAACLMKYIPNMTSDRSWELTNQVHYEGQAIVWVGPQVQAELYHEQLLRAGLTMAPLEPEGS

SEQ ID NO: 3110 - protein, 95 aa, Thermosynechococcus elongatus
ASVVPQERQQVARKHYPNYKVIVLNDDFNTFRHVAACLMKYIPNMTSDRSWELTNQVHYEGQAIVWVGPQVQAELYHEQLLRAGLTIAPLEPGGS

SEQ ID NO: 3111 - protein, 95 aa, Thermosynechococcus elongatus; identical to SEQ ID NO: 533

SEQ ID NO: 3112 - protein, 95 aa, Thermosynechococcus elongatus
ASVVPQERQQVARKHYPNYKVIVLNDDFNTFRHVAACLMKYIPNMTSDIAWELTNQVHYEGQAIVWVGPQEQAELYHEQLLRAGLTMAPLEPEGS

SEQ ID NO: 3113 - protein, 95 aa, Thermosynechococcus elongatus
ASVVPQERQQVARKHYPNYKVIVLNDDFNTFRHVAACLMKYIPNMTSDIAWELTNQVHYEGQAIVWVGPQVQAELYHEQLMRAGLTMAPLEPGGS

SEQ ID NO: 3114 - protein, 95 aa, Thermosynechococcus elongatus
ASVVPQERQQVARKHYPNYKVIVLNDDFNTFRHVAACLMKYIPNMTSDIAWELTNQVHYGGRAIVWVGPQEQAELYHEQLLRAGLTMAPLEPEGS

SEQ ID NO: 3115 - protein, 48 aa, Thermosynechococcus elongatus
ASVVPQERQQVARKHYPNYKVIVLNDDFNTFRHVAACLMKYIPNMTSD

SEQ ID NO: 3116 - protein, 95 aa, Thermosynechococcus elongatus; identical to SEQ ID NO: 3

SEQ ID NO: 3117 - protein, 95 aa, Thermosynechococcus elongatus
ASVVPQERQQVARKHYPNYKVIVLNDDFNTFRHVAACLMKYIPNMTSGRAWELTNQVHYEGQAIVWVGPQVQAELYHELLLRAGLTMAPLEPGGS

SEQ ID NO: 3118 - protein, 95 aa, Thermosynechococcus elongatus; identical to SEQ ID NO: 2704

SEQ ID NO: 3119 - protein, 59 aa, Thermosynechococcus elongatus
ASVVPQERQQVARKHYPNYKVIVLNDDFNTFRHVAACLMKYIPNMTSYRAWELTNQVHF

SEQ ID NO: 3120 - protein, 95 aa, Thermosynechococcus elongatus
ASVVPQERQQVARKHYPNYKVIVLNDDFNTFRHVAACLMKYIPNMISDRAWELTNQGHYGGRAIVWVGPQEQAELYHEQLLRAGLTMAPLEPEGS

SEQ ID NO: 3121 - protein, 95 aa, Thermosynechococcus elongatus
ASVVPQERQQVARKHYPNYKVIVLNDDFNTFRHVAACLMKYIPNMISDRAWELTNQVHYKGQAIVWVGPQEQAELNHEQLLRAGLTMAPLEPEGS

SEQ ID NO: 3122 - protein, 95 aa, Thermosynechococcus elongatus
ASVVPQERQQVARKHYPNYKVIVLNDDFNTFRHVAACLMKYIPNMISDRAWELTNQVHYEGQAIVWVGPQEQAELYHEQLLRAGLTMAPLEPEGS

SEQ ID NO: 3123 - protein, 95 aa, Thermosynechococcus elongatus
ASVVPQERQQVARKHYPNYKVIVLNDDFNTFRHVAACLMKYIPNMISDRAWELTNQVHYEGQAIVWVGPQVQAELYHEQLLRAGLTMAPLEPEGS

SEQ ID NO: 3124 - protein, 95 aa, Thermosynechococcus elongatus
ASVVPQERQQVARKHYPNYKVIVLNDDFNTFRHVAACLMKYIPNMISDRAWELTNQVHYEGQAIVWVGPQVQAELYHEQLLRAGLTMAPLEPGGS

SEQ ID NO: 3125 - protein, 95 aa, Thermosynechococcus elongatus
ASVVPQERQQVARKHYPNYKVIVLNDDFNTFRHVAACLMKYIPNMISDRAWELTNQVHYGGQAIVWVGPQEQAELYHEQLLRAGLTMAPLEPEGS

SEQ ID NO: 3126 - protein, 93 aa, Thermosynechococcus elongatus
ASVVPQERQQVARKHYPNYKVIVLNDDFNTFRHVAACLMKYIPNMISDRAWELTNQVHYGGRAIVWVGPQEQAELYHEQLLRAGLTMAPLEPE

SEQ ID NO: 3127 - protein, 95 aa, Thermosynechococcus elongatus; identical to SEQ ID NO: 897

SEQ ID NO: 3128 - protein, 95 aa, Thermosynechococcus elongatus; identical to SEQ ID NO: 54

SEQ ID NO: 3129 - protein, 95 aa, Thermosynechococcus elongatus; identical to SEQ ID NO: 54

SEQ ID NO: 3130 - protein, 95 aa, Thermosynechococcus elongatus
ASVVPQERQQVARKHYPNYKVIVLNDDFNTFRHVAACLMKYIPNITSDRAWELTNQVHYEGLAIVWVGPQVQAELYHEQLLRAGLTLAPLEPGGS

SEQ ID NO: 3131 - protein, 95 aa, Thermosynechococcus elongatus
ASVVPQERQQVARKHYPNYKVIVLNDDFNTFRHVAACLMKYIPNLTSDRAWELTNQVHYEGQAIVWVGPQEQAELYHEQLLRAGLTMAPLEPEGS

SEQ ID NO: 3132 - protein, 95 aa, Thermosynechococcus elongatus
ASVVPQERQQVARKHYPNYKVIVLNDDFNTFRHVAACLMKYIPNLTSDRAWELTNQVHYEGQAIVWVGPQVQAELYHEQLLRAGLTMAPLEPGGS

SEQ ID NO: 3133 - protein, 95 aa, Thermosynechococcus elongatus
ASVVPQERQQVARKHYPNYKVIVLNDDFNTFRHVAACLMKYIPNMTSDRAWDLTNQVHYTGQAIVWVGPQEQAELNHEQLLRAGLTMAPLEQDGS

SEQ ID NO: 3134 - protein, 95 aa, Thermosynechococcus elongatus
ASVVPQERQQVARKHYPNYKVIVLNDDFNTFRHVAACLMKYIPNMTSDRAWELTNQGHYKGQAIVWVGPQEQAELNHEQLLRAGLTMAPLEPEGS

SEQ ID NO: 3135 - protein, 95 aa, Thermosynechococcus elongatus
ASVVPQERQQVARKHYPNYKVIVLNDDFNTFRHVAACLMKYIPNMTSDRAWELTNQVNYKGQAIVWVGPQEQAELNHEQLLRAGLTMAPLEPEGS

SEQ ID NO: 3136 - protein, 95 aa, Thermosynechococcus elongatus
ASVVPQERQQVARKHYPNYKVIVLNDDFNTFRHVAACLMKYIPNMTSDRAWELTNQVHYKRQAIVWVGPQEQAELNHEQLLRAGLTMAPLEPEGS

SEQ ID NO: 3137 - protein, 95 aa, Thermosynechococcus elongatus; identical to SEQ ID NO: 35

SEQ ID NO: 3138 - protein, 95 aa, Thermosynechococcus elongatus; identical to SEQ ID NO: 35

SEQ ID NO: 3139 - protein, 95 aa, Thermosynechococcus elongatus
ASVVPQERQQVARKHYPNYKVIVLNDDFNTFRHVAACLMKYIPNMTSDRAWELTNQVHYKGQAIVWVGPQEQAELNHKQLLRAGLTMAPLEPEGS

SEQ ID NO: 3140 - protein, 95 aa, Thermosynechococcus elongatus
ASVVPQERQQVARKHYPNYKVIVLNDDFNTFRHVAACLMKYIPNMTSDRAWELTNQVHYKGQAIVWVGPQEQAELNHEQLWRAGLTMAPLEPEGS

SEQ ID NO: 3141 - protein, 95 aa, Thermosynechococcus elongatus
ASVVPQERQQVARKHYPNYKVIVLNDDFNTFRHVAACLMKYIPNMTSDRAWELTNQVHYKGQAIVWVGPQEQAELNHEQLLRAGLTMTPLEPEGS

SEQ ID NO: 3142 - protein, 95 aa, Thermosynechococcus elongatus; identical to SEQ ID NO: 2752

SEQ ID NO: 3143 - protein, 95 aa, Thermosynechococcus elongatus
ASVVPQERQQVARKHYPNYKVIVLNDDFNTFRHVAACLMKYIPNMTSDRAWELTNQVHYKGQAIVWVGPQEQAELNHEQLLRAGLTMAQLEPEGS

SEQ ID NO: 3144 - protein, 93 aa, Thermosynechococcus elongatus
ASVVPQERQQVARKHYPNYKVIVLNDDFNTFRHVAACLMKYIPNMTSDRAWELTNQVHYKGQAIVWVGPQEQAELNHEQLLRAGLTMAPLEPE

SEQ ID NO: 3145 - protein, 95 aa, Thermosynechococcus elongatus
ASVVPQERQQVARKHYPNYKVIVLNDDFNTFRHVAACLMKYIPNMTSDRAWELTNQVHYKGQAIVWVGPQEQAELNHEQLLRAGLTMAPLEQEGS

SEQ ID NO: 3146 - protein, 95 aa, Thermosynechococcus elongatus
ASVVPQERQQVARKHYPNYKVIVLNDDFNTFRHVAACLMKYIPNMTSDRAWELTNQVHYKGQAIVWVGPQEQAELNHEQLLRACLTMAPLEPEGS

SEQ ID NO: 3147 - protein, 95 aa, Thermosynechococcus elongatus
ASVVPQERQQVARKHYPNYKVIVLNDDFNTFRHVAACLMKYIPNMTSDRAWELTNQVHYKGQAIVWVGPQEQAELNHEHLLRAGLTMAPLEPEGS

SEQ ID NO: 3148 - protein, 95 aa, Thermosynechococcus elongatus
ASVVPQERQQVARKHYPNYKVIVLNDDFNTFRHVAACLMKYIPNMTSDRAWELTNQVHYKGQAIVWVGPQEQAELSHGQLLRAGLTMAPLEPEGS

SEQ ID NO: 3149 - protein, 95 aa, Thermosynechococcus elongatus
ASVVPQERQQVARKHYPNYKVIVLNDDFNTFRHVAACLMKYIPNMTSDRAWELTNQVHYKGQAIVWVGPQEQAELHHEQLLRAGLTMAPLEPEGS

SEQ ID NO: 3150 - protein, 95 aa, Thermosynechococcus elongatus; identical to SEQ ID NO: 35

SEQ ID NO: 3151 - protein, 95 aa, Thermosynechococcus elongatus
ASVVPQERQQVARKHYPNYKVIVLNDDFNTFRHVAACLMKYIPNMTSDRAWELTNQVHYKGQAIVWVCPQEQAELNHEQLLRAGFTMAPLEPEGS

SEQ ID NO: 3152 - protein, 95 aa, Thermosynechococcus elongatus
ASVVPQERQQVARKHYPNYKVIVLNDDFNTFRHVAACLMKYIPNMTSDRAWELTNQVHYKGQAIVLVGPQEQAELNHEQLLRAGLTMAPLEPEGS

SEQ ID NO: 3153 - protein, 95 aa, Thermosynechococcus elongatus
ASVVPQERQQVARKHYPNYKVIVLNDDFNTFRHVAACLMKYIPNMTSDRAWELTNQVHYKCQAIVWVGPQEQAELNHEQLLRAGLTMAPLEPEGS

SEQ ID NO: 3154 - protein, 95 aa, Thermosynechococcus elongatus
ASVVPQERQQVARKHYPNYKVIVLNDDFNTFRHVAACLMKYIPNMTSDRAWELTNQVHYTGQAIVWVGPQDQAALNHEPLLRAGLTMAPLEPEGS

SEQ ID NO: 3155 - protein, 95 aa, Thermosynechococcus elongatus
ASVVPQERQQVARKHYPNYKVIVLNDDFNTFRHVAACLMKYIPNMTSDRAWELTNQVHYTGQAIVWVGPQEQAELNHEQLLRAGLTMAPLEPEGS

SEQ ID NO: 3156 - protein, 95 aa, Thermosynechococcus elongatus
ASVVPQERQQVARKHYPNYKVIVLNDDFNTFRHVAACLMKYIPNMTSDRAWELTNQVHYTGQAIVWVGPQEQAELYHEQLLRAGLTMAPLEPEGS

SEQ ID NO: 3157 - protein, 95 aa, Thermosynechococcus elongatus
ASVVPQERQQVARKHYPNYKVIVLNDDFNTFRHVAACLMKYIPNMTSDRAWELTNQVHYTGQAFVCVGPLEQAELNHEQFLRAGLTMAPLEPEGS

SEQ ID NO: 3158 - protein, 95 aa, Thermosynechococcus elongatus; identical to SEQ ID NO: 6

SEQ ID NO: 3159 - protein, 95 aa, Thermosynechococcus elongatus
ASVVPQERQQVARKHYPNYKVIVLNDDFNTFRHVAACLMKYIPNMTSDRAWELTNQVHYEGQAIVWVGPQEQAELYHEQLLIAGLTMAPLEPEGS

SEQ ID NO: 3160 - protein, 95 aa, Thermosynechococcus elongatus; identical to SEQ ID NO: 38

SEQ ID NO: 3161 - protein, 95 aa, Thermosynechococcus elongatus; identical to SEQ ID NO: 243

SEQ ID NO: 3162 - protein, 95 aa, Thermosynechococcus elongatus; identical to SEQ ID NO: 6

SEQ ID NO: 3163 - protein, 95 aa, Thermosynechococcus elongatus
ASVVPQERQQVARKHYPNYKVIVLNDDFNTFRHVAACLMKYIPNMTSDRAWELTNHVHYTGQAIVWVGPQEQAELNHEQLLRAGLTMAPLEPEGS

SEQ ID NO: 3164 - protein, 95 aa, Thermosynechococcus elongatus
ASVVPQERQQVARKHYPNYKVIVLNDDFNTFRHVAACLMKYIPNMTSDRACELTNQVHYKGQAIVWVGPQEQAELNHEQLLRAGLTRAPLEPEGS

SEQ ID NO: 3165 - protein, 95 aa, Thermosynechococcus elongatus; identical to SEQ ID NO: 3122

SEQ ID NO: 3166 - protein, 95 aa, Thermosynechococcus elongatus
ASVVPQERQQVARKHYPNYKVIVLNDDFNTFRHVAACLMKYIPIMTSDRAWELTNLVHYEGQAIVWVGPQVQAELYHEQLLRAGLTMAPLEPGGS

SEQ ID NO: 3167 - protein, 95 aa, Thermosynechococcus elongatus
ASVVPQERQQVARKHYPNYKVIVLNDDFNTFRHVAACLMKYIPHMTSDRAWELTNQVHYEGQAIVWVGPQEQAELYHEQLLRAGLTMAPLEPEGS

SEQ ID NO: 3168 - protein, 95 aa, Thermosynechococcus elongatus
ASVVPQERQQVARKHYPNYKVIVLNDDFNTFRHVAACLMKYIPHMTSDRAWELTNQVHYEGQAIVWVGPQEQAELSHEQLLRAGLTMAPLEPEGS

SEQ ID NO: 3169 - protein, 95 aa, Thermosynechococcus elongatus
ASVVPQERQQVARKHYPNYKVIVLNDDFNTFRHVAACLMKYIPHMTSDRAWELTNQVHYEGQAIVWVGPQVQAELYHEQLLRAGLTMAPLEPEGS

SEQ ID NO: 3170 - protein, 95 aa, Thermosynechococcus elongatus; identical to SEQ ID NO: 524

SEQ ID NO: 3171 - protein, 95 aa, Thermosynechococcus elongatus; identical to SEQ ID NO: 3

SEQ ID NO: 3172 - protein, 95 aa, Thermosynechococcus elongatus; identical to SEQ ID NO: 9

SEQ ID NO: 3173 - protein, 95 aa, Thermosynechococcus elongatus
ASVVPQERQQVARKHYPNYKVIVLNDDFNTFRHVAACLMKYILNMTSDRAWELTNQVHYEGQAIVWVGPQVQAELYHEQLLRAGLTMAPLEPGGS

SEQ ID NO: 3174 - protein, 95 aa, Thermosynechococcus elongatus
ASVVPQERQQVARKHYPNYKVIVLNDDFNTFRHVAACLMKYIANMTSDRAWELTKQVHYEGQAIVWVGPLVQAELYHEQLLRAGLTMAPLEPGGS

SEQ ID NO: 3175 - protein, 95 aa, Thermosynechococcus elongatus
ASVVPQERQQVARKHYPNYKVIVLNDDFNTFRHVAACLMKYIANMTSDRAWELTNQVHYEGQAIVWVGPQELAELYHEHCLRAGLTMAPLEPEGS

SEQ ID NO: 3176 - protein, 95 aa, Thermosynechococcus elongatus
ASVVPQERQQVARKHYPNYKVIVLNDDFNTFRHVAACLMKYISNMTSDRAWELTNQVHYEGQAIVWVGPQEQAELYHEQLLRAGLTMAPLEPEGS

SEQ ID NO: 3177 - protein, 95 aa, Thermosynechococcus elongatus
ASVVPQERQQVARKHYPNYKVIVLNDDFNTFRHVAACLMKYILNMTSDRAWELTNQVHYKGQAIVWVGPQEQAELNHEQLLRAGLTMAPLEPEGS

SEQ ID NO: 3178 - protein, 95 aa, Thermosynechococcus elongatus; identical to SEQ ID NO: 3

SEQ ID NO: 3179 - protein, 95 aa, Thermosynechococcus elongatus
ASVVPQERQQVARKHYPNYKVIVLNDDFNTFRHVAACLMKYVPNMTSDRAWELTNQVHYEGQAIVWVGPQVQAELSHEQLLRAGLTMAPLEPGGS

SEQ ID NO: 3180 - protein, 95 aa, Thermosynechococcus elongatus
ASVVPQERQQVARKHYPNYKVIVLNDDFNTFRHVAACLMKYVPNMTSDRAWELTNQVHYEGQAIVWVGPREQAELYHEQLLRAGLTMAPLEPEGS

SEQ ID NO: 3181 - protein, 80 aa, Thermosynechococcus elongatus
ASVVPQERQQVARKHYPNYKVIVLNDDFNTFRHVAACLMKYFPNMTSESAWELTNQVHYQGQAIVCAGPQVQAELYHEQL

SEQ ID NO: 3182 - protein, 95 aa, Thermosynechococcus elongatus
ASVVPQERQQVARKHYPNYKVIVLNDDFNTFRHVAACLMKCIPNKTSDRAWELTNQVHYEGQAIVWVGPQEQAELYHEQLLRAGLTMAPLEPGGS

SEQ ID NO: 3183 - protein, 95 aa, Thermosynechococcus elongatus
ASVVPQERQQVARKHYPNYKVIVLNDDFNTFRHVAACLMKCIPNMTSDRAWELTNQVHYEGQAIVWVGPQEQAELYHEQLLRAGLTMAPLEPEGS

SEQ ID NO: 3184 - protein, 95 aa, Thermosynechococcus elongatus
ASVVPQERQQVARKHYPNYKVIVLNDDFNTFRHVAACLMKCIPNMTSDRAWELTNQVHYEGQAIVWVGPQEQAELYHEQLLRAGLTMAPLEPGGS

SEQ ID NO: 3185 - protein, 95 aa, Thermosynechococcus elongatus
ASVVPQERQQVARKHYPNYKVIVLNDDFNTFRHVAACLMNYIPDMTSDRAWELTNQVHYEGQAIVWVGPQVQAELYHEQLLRAGLTMAPSEPGGS

SEQ ID NO: 3186 - protein, 95 aa, Thermosynechococcus elongatus
ASVVPQERQQVARKHYPNYKVIVLNDDFNTFRHVAACLMRYIPNMTSDRAWELTNQVHYEGQAIVWVGPQVQAELYHEQLLRAGLTMAPLEPGGS

SEQ ID NO: 3187 - protein, 95 aa, Thermosynechococcus elongatus
ASVVPQERQQVARKHYPNYKVIVLNDDFNTFRHVAACLMEYIPNMTSDRAWELTNQVHYEGQAIVWVGPQVQAELYHEQLLRAGLTMAPLEPGGS

SEQ ID NO: 3188 - protein, 95 aa, Thermosynechococcus elongatus
ASVVPQERQQVARKHYPNYKVIVLNDDFNTFRHVAACLIKYIPNMTSDRAWELTNQVHYEGQAIVWVGPQVQAELYHEQLLRAGLTMAPLEPEGS

SEQ ID NO: 3189 - protein, 95 aa, Thermosynechococcus elongatus; identical to SEQ ID NO: 2652

SEQ ID NO: 3190 - protein, 95 aa, Thermosynechococcus elongatus
ASVVPQERQQVARKHYPNYKVIVLNDDFNTFRHVAACFKKYIPNMISDRAWELTNQVHYGGRAIVWVGPQEQAELYHEQLLRAGLTMAPLEPEGS

SEQ ID NO: 3191 - protein, 95 aa, Thermosynechococcus elongatus
ASVVPQERQQVARKHYPNYKVIVLNDDFNTFRHVAACFMKYIPNKTSDRAWELTNQVHYEGQAIVWVGPQEQAELYHEQLLRAGLTMAPLEPEGS

SEQ ID NO: 3192 - protein, 95 aa, Thermosynechococcus elongatus
ASVVPQERQQVARKHYPNYKVIVLNDDFNTFRHVAAWLMKYIPNMTSDRDWELTNQVHYEGQAIVWVGPQVQAELYHEQLLRAGLTMAPLEPGGS

SEQ ID NO: 3193 - protein, 95 aa, Thermosynechococcus elongatus; identical to SEQ ID NO: 1350

SEQ ID NO: 3194 - protein, 95 aa, Thermosynechococcus elongatus
ASVVPQERQQVARKHYPNYKVIVLNDDFNTFRHVAAWLMKYIPNMTSDRAWELTNQVHYEGQAIVWVGPLVQAVLYHVQLLRAGLSMATLEPEGS

SEQ ID NO: 3195 - protein, 95 aa, Thermosynechococcus elongatus
ASVVPQERQQVARKHYPNYKVIVLNDDFNTFRHVAAWLMKYIPNMTSDRAWELTNQVHYAGQAIVWVGPQVQAELYHEQLLRAGLTMAPLEPGGS

SEQ ID NO: 3196 - protein, 95 aa, Thermosynechococcus elongatus
ASVVPQERQQVARKHYPNYKVIVLNDDFNTFRHVAAWLMKYIPNMTSDRAWELTNQVLYEGQAIVWVGPQEQAVLYLEQLLRAGLTMAPLEPEGS

SEQ ID NO: 3197 - protein, 95 aa, Thermosynechococcus elongatus
ASVVPQERQQVARKHYPNYKVIVLNDDFNTFRHVAAWLMKYIPNMTSDRACELTNQVHYGGRAIVWVGPQEQAELYHEQLLRAGLTMAPIEPEGS

SEQ ID NO: 3198 - protein, 95 aa, Thermosynechococcus elongatus
ASVVPQERQQVARKHYPNYKVIVLNDDFNTFRHVAAWLMKYISNMTSDRAWELTNQVHYEGQAIVWVGPQEQAELYHEQLLRAGLTMAPLEPEGS

SEQ ID NO: 3199 - protein, 95 aa, Thermosynechococcus elongatus; identical to SEQ ID NO: 6

SEQ ID NO: 3200 - protein, 95 aa, Thermosynechococcus elongatus; identical to SEQ ID NO: 338

SEQ ID NO: 3201 - protein, 95 aa, Thermosynechococcus elongatus
ASVVPQERQQVARKHYPNYKVIVLNDDFNTFRHVAAFLMKYIPNMTSDRAWELTNQVHYEGQAIVWVGPQEQAELYHEQLLRVGLTMAPLEPEGS

SEQ ID NO: 3202 - protein, 95 aa, Thermosynechococcus elongatus
ASVVPQERQQVARKHYPNYKVIVLNDDFNTFRHVAAFLMKYIPNMTSDRAWELTNQVHYEGQAIVWVGPQVQAELNHEQLLRAGLTMAPLEPEGS

SEQ ID NO: 3203 - protein, 95 aa, Thermosynechococcus elongatus
ASVVPQERQQVARKHYPNYKVIVLNDDFNTFRHVAAFLMKYIPNMTSDRAWELTNQVHYGGRAIVWVGPQEQAELYHEQLLRAGLTMAPLEPEGS

SEQ ID NO: 3204 - protein, 95 aa, Thermosynechococcus elongatus; identical to SEQ ID NO: 3

SEQ ID NO: 3205 - protein, 95 aa, Thermosynechococcus elongatus
ASVVPQERQQVARKHYPNYKVIVLNDDFNTFRHVAACLMKYIPNMTSDRAWELTNQGHYDGQAIVWVGPQVQAELYHEQLLRAGLTMAPLEPGGS

SEQ ID NO: 3206 - protein, 95 aa, Thermosynechococcus elongatus; identical to SEQ ID NO: 6

SEQ ID NO: 3207 - protein, 95 aa, Thermosynechococcus elongatus; identical to SEQ ID NO: 6

SEQ ID NO: 3208 - protein, 95 aa, Thermosynechococcus elongatus; identical to SEQ ID NO: 9

SEQ ID NO: 3209 - protein, 95 aa, Thermosynechococcus elongatus
ASVVPQERQQVARKHYPNYKVIVLNDDFNTFRHVAVCLMKYIPNKTSDRAWELTNQVHYEGQAIVWVGPQEQAELYHEQLLRAGLTMAPLEPEGS

SEQ ID NO: 3210 - protein, 95 aa, Thermosynechococcus elongatus
ASVVPQERQQVARKHYPNYKVIVLNDDFNTFRHVASCLMKYIPNMTSDRAWELTNQVHYEGQAIVWVGPQEQAELYHEQLLRAGLTMAPLEPGGS

SEQ ID NO: 3211 - protein, 95 aa, Thermosynechococcus elongatus
ASVVPQERQQVARKHYPNYKVIVLNDDFNTFRHVASCLMKYIPNMTSDRAWELTNQVHYEGQAIVWVGPQVQAELYHEQLLRAGLTMAPLEPEGS

SEQ ID NO: 3212 - protein, 59 aa, Thermosynechococcus elongatus
ASVVPQERQQVARKHYPNYKVIVLNDDFNTFRHVASCLMKYIPNMTSDRAWELTNQVHY

SEQ ID NO: 3213 - protein, 95 aa, Thermosynechococcus elongatus
ASVVPQERQQVARKHYPNYKVIVLNDDFNTFRHVGACLMKYIPNMTSDRAWELTNQVHYEGQAIVWVGPQVQAELYHEQLLRAGLTMAPLEPGGS

SEQ ID NO: 3214 - protein, 95 aa, Thermosynechococcus elongatus
ASVVPQERQQVARKHYPNYKVIVLNDDFNTFRHVVACLKKYIPNMTSDRAWELTNQVHYEGQAIVWVGPQEQAELYHEQLLRAGLTMAPLEPEGS

SEQ ID NO: 3215 - protein, 95 aa, Thermosynechococcus elongatus
ASVVPQERQQVARKHYPNYKVIVLNDDFNTFRHVVACLKKYIPNMISDRAWELTNQVHYEGQAIVWVGPQEQAELYHEQLLRAGLTMAPLEPGGS

SEQ ID NO: 3216 - protein, 95 aa, Thermosynechococcus elongatus
ASVVPQERQQVARKHYPNYKVIVLNDDFNTFRHVVACLKKYIPNMISDRAWELTNQVHYEGQAIVWVGPQEQAELYREQLLRAGLTMAPLEPEGS

SEQ ID NO: 3217 - protein, 95 aa, Thermosynechococcus elongatus
ASVVPQERQQVARKHYPNYKVIVLNDDFNTFRHVVACLKKYIPNMISDRAWELTNQVHYEGQAIVWVGPREQAELYHEQLLRVGLTMAPLEPEGS

SEQ ID NO: 3218 - protein, 95 aa, Thermosynechococcus elongatus; identical to SEQ ID NO: 90

SEQ ID NO: 3219 - protein, 95 aa, Thermosynechococcus elongatus
ASVVPQERQQVARKHYPNYKVIVLNDDFNTFRHVVACLKKYIPNMISDRAWELTNQVHYGGRAIVWDGPQEQAELYHEQLLRAGLTMAPLEPEGS

SEQ ID NO: 3220 - protein, 95 aa, Thermosynechococcus elongatus
ASVVPQERQQVARKHYPNYKVIVLNDDFNTFRHVVACLKKYIPNMISDRAWELTNQVHYGGRAIVWVGPQEQAELNHEQLLRAGLTMAPLEPEGS

SEQ ID NO: 3221 - protein, 95 aa, Thermosynechococcus elongatus
ASVVPQERQQVARKHYPNYKVIVLNDDFNTFRHVVACLKKYIPNMISDRAWELTNQVHYGGRAIVWVGPQEQAELYHEQLVRAGLTRAPLEPEGS

SEQ ID NO: 3222 - protein, 95 aa, Thermosynechococcus elongatus; identical to SEQ ID NO: 1355

SEQ ID NO: 3223 - protein, 95 aa, Thermosynechococcus elongatus
ASVVPQERQQVARKHYPNYKVIVLNDDFNTFRHVVACLKKYIPNMISDRAWELTNQVHYGGRAIVWVGPQEQAELYPEQLLRAGLTMAPLEPEGS

SEQ ID NO: 3224 - protein, 95 aa, Thermosynechococcus elongatus
ASVVPQERQQVARKHYPNYKVIVLNDDFNTFRHVVACLKKYIPNMISDRAWELTNQVLYGGRAIVWVGPQEQAELYHEQLLRAGLTMAPLEPEGS

SEQ ID NO: 3225 - protein, 95 aa, Thermosynechococcus elongatus
ASVVPQERQQVARKHYPNYKVIVLNDDFNTFRHVVACLKKYIPNMISDRAWELSNQVHYGGRAIVWVGPQEQAELYHEQLLRAGLTMAPLEPEGS

SEQ ID NO: 3226 - protein, 95 aa, Thermosynechococcus elongatus
ASVVPQERQQVARKHYPNYKVIVLNDDFNTFRHVVACLMKYIPNMTSDRAWELTNQVHYEGQAIVLVGPQEQAELYHEQLLRAGLTMAPLEPEGS

SEQ ID NO: 3227 - protein, 95 aa, Thermosynechococcus elongatus
ASVVPQERQQVARKHYPNYKVIVLNDDFNTFRHFAACLKKYIPNMISDRAWELTNQLHYEGQAIVWVGPQVQAELYHEQLLRAGLTMAPLEPGGS

SEQ ID NO: 3228 - protein, 95 aa, Thermosynechococcus elongatus
ASVVPQERQQVARKHYPNYKVIVLNDDFNTFRHFAACLMKNIPNMTSDRAWELTNQVHDAGQAIVWVGPQVQAELYHEQLLRAGLTMAPLEPEGS

SEQ ID NO: 3229 - protein, 59 aa, Thermosynechococcus elongatus
ASVVPQERQQVARKHYPNYKVIVLNDDFNTFRHFAACLMKYIPNMTSDRAWELTNQVHY

SEQ ID NO: 3230 - protein, 95 aa, Thermosynechococcus elongatus
ASVVPQERQQVARKHYPNYKVIVLNDDFNTFRHFAACLMKYIPNMTSDRAWELTNQVLLEGLDIVCVGPQEQAELYHVKLLRAGLSMAPLEPEGS

SEQ ID NO: 3231 - protein, 51 aa, Thermosynechococcus elongatus
ASVVPQERQQVARKHYPNYKVIVLNDDFNTFRHFAACLMKYIPNMTSDRAW

SEQ ID NO: 3232 - protein, 95 aa, Thermosynechococcus elongatus
ASVVPQERQQVARKHYPNYKVIVLNDDFNTFRYVAACLMKYIPNMTSDRAWELTNQVHYEGQAIVWVGPQEQAELYHEQLLRAGLTMAPLEPEGS

SEQ ID NO: 3233 - protein, 95 aa, Thermosynechococcus elongatus
ASVVPQERQQVARKHYPNYKVIVLNDDFNTFRHVAACLMKYIPNMTSDRAWELTNQVHYEGQAIIWVGPQVQAELYHEQLLRAGLTMAPLEPGGS

SEQ ID NO: 3234 - protein, 95 aa, Thermosynechococcus elongatus; identical to SEQ ID NO: 3

SEQ ID NO: 3235 - protein, 95 aa, Thermosynechococcus elongatus; identical to SEQ ID NO: 35

SEQ ID NO: 3236 - protein, 95 aa, Thermosynechococcus elongatus; identical to SEQ ID NO: 9

SEQ ID NO: 3237 - protein, 95 aa, Thermosynechococcus elongatus
ASVVPQERQQVARKHYPNYKVIVLNDDFNTFLHVDACLKKYIPNMTSDRAWELTNQVHYGGRAIVWVGPQEQAELYHEQLLRAGLTMAPLEPEGS

SEQ ID NO: 3238 - protein, 95 aa, Thermosynechococcus elongatus
ASVVPQERQQVARKHYPNYKVIVLNDDFNTFLHVAACLKKYIPNMISDRAWELTNQVHYGGRAIVWVGPQEQAELYHEQLLRAGLTMAPLEPEGS

SEQ ID NO: 3239 - protein, 95 aa, Thermosynechococcus elongatus
ASVVPQERQQVARKHYPNYKVIVLNDDFNTFLHVAACLMKYIPNMTSDRAWELTNQVHYEGQAIVWVGPQVQAELYHEQLLRAGLTMAPLEPEGS

SEQ ID NO: 3240 - protein, 95 aa, Thermosynechococcus elongatus
ASVVPQERQQVARKHYPNYKVIVLNDDFNTFLHVAACLMKYIPNMTSDRAWELTNQVHYEGRAIVWVGPQEQAELYHEQLLRAGLTMAPLEPEGS

SEQ ID NO: 3241 - protein, 95 aa, Thermosynechococcus elongatus
ASVVPQERQQVARKHYPNYKVIVLNDDFNTFLHVAACLMKYIPNMTSDRAWELTNQVHYGGQAIVWVGPQVQAELYHEQLLRAGLTMAPLEPGGS

SEQ ID NO: 3242 - protein, 95 aa, Thermosynechococcus elongatus
ASVVPQERQQVARKHYPNYKVIVLNDDFNTFLHVAACLMKYIPNMISDRAWELTNQVHYVGRAIVWVGPQEQAELYHEQLLRAGLTMAPLEPEGS

SEQ ID NO: 3243 - protein, 31 aa, Thermosynechococcus elongatus; identical to SEQ ID NO: 1359

SEQ ID NO: 3244 - protein, 95 aa, Thermosynechococcus elongatus; identical to SEQ ID NO: 9

SEQ ID NO: 3245 - protein, 95 aa, Thermosynechococcus elongatus
ASVVPQERQQVARKHYPNYKVIVLNDDFNIFRHVAACLMKYIPNMTSDRAWELTNQVHYKGQAIVWVGPQEQAELNHEQLLRAGLTMAPLEPEGS

SEQ ID NO: 3246 - protein, 95 aa, Thermosynechococcus elongatus
ASVVPQERQQVARKHYPNYKVIVLNDDFNAFRHVAACLMKYIPNKTSNRAWELTNQVHYEGQAIVWVGPQEQAELYHEQLLRAGLTMAPLEPEGS

SEQ ID NO: 3247 - protein, 95 aa, Thermosynechococcus elongatus
ASVVPQERQQVARKHYPNYKVIVLNDDFNAFRHVAACLMKYIPNMTSDRAWELTNQVHYEGQAIVWVGPQVQAELYHEQLLRAGLTMAPLEPGGS

SEQ ID NO: 3248 - protein, 74 aa, Thermosynechococcus elongatus
ASVVPQERQQVARKHYPNYKVIVLNDDFNSFRPGAACLMKFIPNMTSDRAWELTNQDHYEGQAIVWVGPQVHAE

SEQ ID NO: 3249 - protein, 95 aa, Thermosynechococcus elongatus; identical to SEQ ID NO: 21

SEQ ID NO: 3250 - protein, 95 aa, Thermosynechococcus elongatus
ASVVPQERQQVARKHYPNYKVIVLNDDFSTFQHVVACLKKYTPNMISDRAWELTNQVHYGGRAIVWVGPQEQAELYHEQLLRAGLTMAPLEPEGS

SEQ ID NO: 3251 - protein, 95 aa, Thermosynechococcus elongatus
ASVVPQERQQVARKHYPNYKVIVLNDDFSTFRHVAACLMKYIPNMTSDRAWELTNQVHYEGQAIVWVGPQVQAELYHEQLLRAGLTMAPLEPGGS

SEQ ID NO: 3252 - protein, 90 aa, Thermosynechococcus elongatus
ASVVPQERQQVARKHYPNYKVIVLNDDFITFRHVAACLMKYIPNMTSDRAWELTNQVHYEGQSIVWVGPQLQAELYHEQLMRSGLTMAPL

SEQ ID NO: 3253 - protein, 95 aa, Thermosynechococcus elongatus
ASVVPQERQQVARKHYPNYKVIVLNDDFITFRHVAACLMKYIPNMTSDRAWELTNQVHYEGQAIVWVGPQEQAELYHEQLLRAGLTMAPLEPEGS

SEQ ID NO: 3254 - protein, 95 aa, Thermosynechococcus elongatus
ASVVPQERQQVARKHYPNYKVIVLNDDFITFRHVAACLMKYIPNMTSDRAWELTNQVHYEGQAIVWVCPQVQAELYHEQLLRACLTMAPLEPGGS

SEQ ID NO: 3255 - protein, 95 aa, Thermosynechococcus elongatus
ASVVPQERQQVARKHYPNYKVIVLNDDFITFRHVAACLMKYIPHMTSDRAWELTNQVHYKGQAIVWVGPQEQAELNHEQLLRAGLTMAPLEPEGS

SEQ ID NO: 3256 - protein, 95 aa, Thermosynechococcus elongatus
ASVVPQERQQVARKHYPNYKVIVLNDDFDTFQHVVACLMKYIPNKTSDRAWELTNQVHYEGQAIVWVGPQEQAELYHEQLLRAGLTMAPLEPEGS

SEQ ID NO: 3257 - protein, 59 aa, Thermosynechococcus elongatus
ASVVPQERQQVARKHYPNYKVIVLNDDFYTFRHVDACLMKYIPNMTSDRDWELTNQVHY

SEQ ID NO: 3258 - protein, 73 aa, Thermosynechococcus elongatus
ASVVPQERQQVARKHYPNYKVIVLNDDFYTFRHVAACLMKYITNMTSDRAWELTNQVHYEGQAIDWVGPQVQA

SEQ ID NO: 3259 - protein, 95 aa, Thermosynechococcus elongatus
ASVVPQERQQVARKHYPNYKVIVLNDDFYTFRHVAACLMKYIPNKTSDRAWELTNQVHYEGQAIVWVGPQEQAELYHEQLLRAGLTMAPLEPEGS

SEQ ID NO: 3260 - protein, 95 aa, Thermosynechococcus elongatus
ASVVPQERQQVARKHYPNYKVIVLNDDFYTFRHVAACLMKYIPNMTSDRAWELTNQVHYEGQAIVWVGPQEQAELYHEQLLRAGLTMAPLEPGGS

SEQ ID NO: 3261 - protein, 95 aa, Thermosynechococcus elongatus
ASVVPQERQQVARKHYPNYKVIVLNDDFYTFRHVAACLMKYIPNMTSDRAWELTNQVHYEGQAIVWVGPQVQAELYHEQLLRAGLTMAPLEPEGS

SEQ ID NO: 3262 - protein, 95 aa, Thermosynechococcus elongatus
ASVVPQERQQVARKHYPNYKVIVLNDDFYTFRHVAACLMKYIPNMTSDRAWELTNQVHYEGQAIVWVGPREQAELYHEQLLRVGLTMAPLEPEGS

SEQ ID NO: 3263 - protein, 95 aa, Thermosynechococcus elongatus; identical to SEQ ID NO: 19

SEQ ID NO: 3264 - protein, 95 aa, Thermosynechococcus elongatus; identical to SEQ ID NO: 6

SEQ ID NO: 3265 - protein, 95 aa, Thermosynechococcus elongatus; identical to SEQ ID NO: 6

SEQ ID NO: 3266 - protein, 95 aa, Thermosynechococcus elongatus; identical to SEQ ID NO: 9

SEQ ID NO: 3267 - protein, 95 aa, Thermosynechococcus elongatus; identical to SEQ ID NO: 1242

SEQ ID NO: 3268 - protein, 95 aa, Thermosynechococcus elongatus
ASVVPQERQQVARKHYPNYKVIVLNDGFNTFRHVAACLMKYIPNMTSDRAWELTNQVHYEGQAIVWVGPQEQAELYHEQLLRAGLTMAPLEPGGS

SEQ ID NO: 3269 - protein, 95 aa, Thermosynechococcus elongatus; identical to SEQ ID NO: 3268

SEQ ID NO: 3270 - protein, 95 aa, Thermosynechococcus elongatus
ASVVPQERQQVARKHYPNYKVIVLNDGFNTFRHVAACLMKYIPNMTSDRAWELTNQVHYKGQAIVWVGPQEQAELNHEQLLRAGLTMAPLEPEGS

SEQ ID NO: 3271 - protein, 95 aa, Thermosynechococcus elongatus
ASVVPQERQQVARKHYPNYKVIVLNDVFNTFRHVAACLMKYIPNLTSDRAWELTNQVHYEGQAIVWVGPQVQAELYHEQLLRAGLTMAPLEPGGS

SEQ ID NO: 3272 - protein, 95 aa, Thermosynechococcus elongatus
ASVVPQERQQVARKHYPNYKVIVLNDYFNTFQHVVACLKKYIPNMISDRAWELTNQVHYGGRAIVWVGPQEQAELYHEQLLRAGLTMAPLEPEGS

SEQ ID NO: 3273 - protein, 95 aa, Thermosynechococcus elongatus
ASVVPQERQQVARKHYPNYKVIVLNDYFNTFRHGAACLMKYIPNMTSDRAWELTNQCHFEGLAIVWVGAHVQADLYLEQLLRAGLSMAPLVPVGS

SEQ ID NO: 3274 - protein, 95 aa, Thermosynechococcus elongatus; identical to SEQ ID NO: 909

SEQ ID NO: 3275 - protein, 95 aa, Thermosynechococcus elongatus
ASVVPQERQQVARKHYPNYKVIVLNDYFNTFRHVAACLMKYIPNMTSDRAWELTNQVHYGGRAIVWVGPQEQAELYHEQLLRAGLTMAPLEPEGS

SEQ ID NO: 3276 - protein, 95 aa, Thermosynechococcus elongatus
ASVVPQERQQVARKHYPNYKVIVLNEDFNTFRHVAACLMKYIPNMTSDRAWELTNQVHYKGQAIVWVGPQEQAELNHEQLLRAGLTMAPLEPEGS

SEQ ID NO: 3277 - protein, 95 aa, Thermosynechococcus elongatus
ASVVPQERQQVARKHYPNYKVIVLNADFNTFRHVAACLMKYIPNMTSDRAWELTNQVHYEGQAIVWVGPQVQAELYHEQLLRAGLTMAPLEPGGS

SEQ ID NO: 3278 - protein, 95 aa, Thermosynechococcus elongatus
ASVVPQERQQVARKHYPNYKVIVLNGDFNTFRHVAACLMKYIPNMTSDRAWELTNLVHYEGQAIVWVGPQEQAELYHEQLLRAGLTMAPLEPEGS

SEQ ID NO: 3279 - protein, 95 aa, Thermosynechococcus elongatus
ASVVPQERQQVARKHYPNYKVIVLNYDFNTFRHVAACLMKYIPNKTSDRAWELTNQVHYEGQAIVWVGPQEQAELYHEQLLRAGLTMAPLEPGGS

SEQ ID NO: 3280 - protein, 95 aa, Thermosynechococcus elongatus
ASVVPQERQQVARKHYPNYKVIVLNYDFNTFRHVAACLMKYIPNMTSDRAWELTNQVHYEGQAIVWVGPQEQAELYHEQLLRAGLTMAPLEPEGS

SEQ ID NO: 3281 - protein, 95 aa, Thermosynechococcus elongatus
ASVVPQERQQVARKHYPNYKVIVLNYDFNTFRHVAACLMKYIPNMTSDRAWELTNQVHYEGLAIVWVGPQEQAELYHEQLLRAGLTMAPLEPEGS

SEQ ID NO: 3282 - protein, 95 aa, Thermosynechococcus elongatus
ASVVPQERQQVARKHYPNYKVIVLNYDFNTFRHVAACLMKYIPNMTSDRAWELTNQVHYECQAIVWVGPQVQAELYHEQLLRAGLTMAPLEPGGS

SEQ ID NO: 3283 - protein, 95 aa, Thermosynechococcus elongatus
ASVVPQERQQVARKHYPNYKVIVLTDDFNTFRPVAAGLMKDIPNMTSDRAWELTHQGHYEGQAIVWVGPQVQAELYHEQLWRAGLTMAPLEPGGS

SEQ ID NO: 3284 - protein, 95 aa, Thermosynechococcus elongatus
ASVVPQERQQVARKHYPNYKVIVLYDDFNTFQHVAACLMKYIPNMTSDRAWELTNQVHYVGQAIVWVGPQEQAELYHEQLLRAGLTMAPLEPEGS

SEQ ID NO: 3285 - protein, 36 aa, Thermosynechococcus elongatus
ASVVPQERQQVARKHYPNYKVIVLYDDFNTFRHVAA

SEQ ID NO: 3286 - protein, 95 aa, Thermosynechococcus elongatus
ASVVPQERQQVARKHYPNYKVIVLYDDFNTFRHVAACLMKYIPNMTSDRAWELNNQVHYEGQAIVWVGPQVQAELYHEQLLRAGLTMAPLEPGGS

SEQ ID NO: 3287 - protein, 95 aa, Thermosynechococcus elongatus
ASVVPQERQQVARKHYPNYKVIVLYDDFNTFRHVAACLMKYIPNMTSDRAWELTNQVHYEGQAIDWVGPQVQAELYHEQLLRAGLTMAPLEPGGS

SEQ ID NO: 3288 - protein, 95 aa, Thermosynechococcus elongatus
ASVVPQERQQVARKHYPNYKVIVLYDDFYTFQHVVACLKKYIPNMISDRAWELTNQVHYGGRAIVWVGPQEQAELYHEQLLRAGLTMAPLEPEGS

SEQ ID NO: 3289 - protein, 95 aa, Thermosynechococcus elongatus
ASVVPQERQQVARKHYPNYKVIVFNDDFNTFQHVVACLKKYIPNMISDRAWELTNQVHYGGRAIVWVGPQEQAELYHEQLLRAGLTMAPLEPEGS

SEQ ID NO: 3290 - protein, 95 aa, Thermosynechococcus elongatus
ASVVPQERQQVARKHYPNYKVIVFNDDFNTFRHVAACLKKYIPNMISDRAWELTNQVHYGGRAIVWVGPQEQAELYHEQLLRAGLTMAPLEPEGS

SEQ ID NO: 3291 - protein, 95 aa, Thermosynechococcus elongatus
ASVVPQERQQVARKHYPNYKVIVFNDDFNTFRHVAACLMKYIPNMTSDRAWELTNQGHYEGQAIVWVGPQVQAELYHEQLLRAGLTMAPLEPGGS

SEQ ID NO: 3292 - protein, 95 aa, Thermosynechococcus elongatus
ASVVPQERQQVARKHYPNYKVIVFNDDFNTFRHVAACLMKYIPNMTSDRAWELTNQVHYEGQAIVWVGPQEQAELYHEQLLRAGLTMAPLEPEGS

SEQ ID NO: 3293 - protein, 95 aa, Thermosynechococcus elongatus
ASVVPQERQQVARKHYPNYKVIVFNDDFNTFRHVAACLMKYIPNMTSDRAWELTNQVHYEGQAIVWVGPQVQAELYHEQLLRAGLTMAPLEPEGS

SEQ ID NO: 3294 - protein, 95 aa, Thermosynechococcus elongatus
ASVVPQERQQVARKHYPNYKVIFLNDDFNTFRHVAACLMKYIPNMTSDRAWELTNQVHYEGQAIVWVGPQVQAELYHEQLLRAGLTMAPLEPEGS

SEQ ID NO: 3295 - protein, 95 aa, Thermosynechococcus elongatus; identical to SEQ ID NO: 3294

SEQ ID NO: 3296 - protein, 95 aa, Thermosynechococcus elongatus
ASVVPQERQQVARKHYPNYKVMVLNDDFNTFRHVAACLMKYIPNMTSDRAWELTNQVHYEGQAIDWVGPQVQAELYHEQLLRAGLTMAPLEPGGS

SEQ ID NO: 3297 - protein, 95 aa, Thermosynechococcus elongatus
ASVVPQERQQVARKHYPNYKVMVLNDDFNTFRHVAACLMKYIPNMTSDRAWELTNQVHYEGQAIVWVGPQVQAELYHEQLLRAGLTMAPLEPGGS

SEQ ID NO: 3298 - protein, 95 aa, Thermosynechococcus elongatus
ASVVPQERQQVARKHYPNYKVMVLNDDFNTFRHVAACLMKYIPNMTSDRAWELTNQVHYEGQAIVWVGPQVQAELYYEQLLRAGLTMAPLEPGGS

SEQ ID NO: 3299 - protein, 95 aa, Thermosynechococcus elongatus
ASVVPQERQQVARKHYPNYKVMVLNDDFNTFRHVAACLMKYIPNMTSDRAWELTNQVHYEGRAIVWVGPQEQAELYHEQLLRAGLTMAPLEPEGS

SEQ ID NO: 3300 - protein, 95 aa, Thermosynechococcus elongatus
ASVVPQERQQVARKHYPNYKVLGVYDDFNTFRHVAACLMKYIPKMTSDRAWEVTNQVHYTGQAIVWVGPQEQAELNHEQLLRAGLTMAPLEPEGS

SEQ ID NO: 3301 - protein, 95 aa, Thermosynechococcus elongatus
ASVVPQERQQVARKHYPNYKVLVLNDDFNTFRHVAACLMKYIPNMTSDRAWELTNQVHYEGQAIVWVGPQVQAELYHEQLLRAGLTMAPLEPGGS

SEQ ID NO: 3302 - protein, 95 aa, Thermosynechococcus elongatus; identical to SEQ ID NO: 3301

SEQ ID NO: 3303 - protein, 95 aa, Thermosynechococcus elongatus
ASVVPQERQQVARKHYPNYKVLVLNDDFNTFRHVAACLMKYIPNLTSDRAWELTNQVHYEGQAIVWVGPQEQAELYHEQLLRAGLTMAPLEPEGS

SEQ ID NO: 3304 - protein, 95 aa, Thermosynechococcus elongatus
ASVVPQERQQVARKHYPNYKVVVLNDDFNTFRHVAACLMKYIPNMTSDRAWELTNQVHYEGQAIVWVGPQEQAELYHEQLLRAGLTMAPLEPEGS

SEQ ID NO: 3305 - protein, 95 aa, Thermosynechococcus elongatus
ASVVPQERQQVARKHYPNYKVVVLNDDFNTFRHVAACLMKYIPNMTSDRAWELTNQVHYEGQAIVWVGPQVQAELYHEQLLRAGLTMAPLEPEGS

SEQ ID NO: 3306 - protein, 95 aa, Thermosynechococcus elongatus
ASVVPQERQQVARKHYPNYKVVVLNDDFNTFRHVAACLMKYIPNMISDRAWELTNQVHYGGRAIVWVGPQEQAELYHEQLLRAGLTMAPLEPEGS

SEQ ID NO: 3307 - protein, 95 aa, Thermosynechococcus elongatus
ASVVPQERQQVARKHYPNYKVLVLNDDFNTFRHVAACLMKYIPNMTSDRAWELTNQVLYVGQAIVWVGPQVQAELYHEQLLRAGLTMATLEPGGS

SEQ ID NO: 3308 - protein, 95 aa, Thermosynechococcus elongatus
ASVVPQERQQVARKHYPNYKFIVLNDDFNTFQHVVACLKKYIPNMISDRAWELTNQVHYGGRAIVWVGPQEQAELYHEQLLRAGLTMAPLEPEGS

SEQ ID NO: 3309 - protein, 95 aa, Thermosynechococcus elongatus
ASVVPQERQQVARKHYPNYKFIVLNDDFNTFRHVAACLMKYIPNMTSDRAWELTNQVHYEGQAIVWVGPQVQAELYHEQLLRAGLTMAPLEPEGS

SEQ ID NO: 3310 - protein, 95 aa, Thermosynechococcus elongatus
ASVVPQERQQVARKHYPNYKFIVLNDDFNTFRHVAACLMKYIPNMTSDRAWELTNQVHYEGQAIVWVGPQVQAELYHEQLLRAGLTMAPLEPGGS

SEQ ID NO: 3311 - protein, 95 aa, Thermosynechococcus elongatus
ASVVPQERQQVARKHYPNYNVIVLNDDFNTIRHVAACLMKYIPNMTSDRAWELTNQVHYEGQAIVWVGPQVQAELYLEQLLRAGLTMATLEPGGS

SEQ ID NO: 3312 - protein, 95 aa, Thermosynechococcus elongatus; identical to SEQ ID NO: 1371

SEQ ID NO: 3313 - protein, 95 aa, Thermosynechococcus elongatus
ASVVPQERQQVARKHYPNYTVIVLNDDFNTFRHVAACLMKYIPNMTSDRAWELTNQVHYEGQAIVWVGPQVQAELYHEQLLRAGLTMAPLEPGGS

SEQ ID NO: 3314 - protein, 95 aa, Thermosynechococcus elongatus
ASVVPQERQQVARKHYPNYTVIVLNDDFNTFRHVAACLMKYIPNMTSDRAWELTNQVHYGGRAIVWVGPQEQAELYHEQLLRAGLTMAPLEPEGS

SEQ ID NO: 3315 - protein, 95 aa, Thermosynechococcus elongatus
ASVVPQERQQVARKHYPNYTVIVLNDGFNTFRHVAACLMKYIPNMTSDRAWELTNQVHYEGQAIVWVGPQEQAELYHEQLLRAGLTMAPLEPGGS

SEQ ID NO: 3316 - protein, 95 aa, Thermosynechococcus elongatus
ASVVPQERQQVARKHYPNYRVIVLNDDFNTFRHVAACLMKYIPNMTSDRAWELTNQVHYEGQAIVWDGPQVQAELYHEQLLRAGLTMAPLEPGGS

SEQ ID NO: 3317 - protein, 95 aa, Thermosynechococcus elongatus
ASVVPQERQQVARKHYPNYRVIVLNDDFNTFRHVAACLMKYIPNMTSDRAWELTNQVHYEGQAIVWVGPQVQAELYHEQLLRAGLTMAPLEPGGS

SEQ ID NO: 3318 - protein, 95 aa, Thermosynechococcus elongatus
ASVVPQERQQVARKHYPNYMVIVLNDDFNTFRHVAACLMKYIPNMTSDRAWELTNQVHYEGQAIVWVGPQEQAELYHEQLLRAGLTMAPLEPEGS

SEQ ID NO: 3319 - protein, 95 aa, Thermosynechococcus elongatus
ASVVPQERQQVARKHYPNYMVIVLNDDFNTFRHVAACLMKYIPNMTSDRAWELTNQVHYEGQAIVWVGPQVQAELYHEQLLRAGLTMAPLEPGGS

SEQ ID NO: 3320 - protein, 95 aa, Thermosynechococcus elongatus
ASVVPQERQQVARKHYPNYQVIVLNDDFNTFRHVAACLMKYIPNMTSDRAWELTNQVHYEGQAIVWVGPQVQAELYHEQLLRAGLTMAPLEPGGS

SEQ ID NO: 3321 - protein, 19 aa, Thermosynechococcus elongatus
ASVVPQERQQVARKHYPNY

SEQ ID NO: 3322 - protein, 19 aa, Thermosynechococcus elongatus
ASVVPQERQQVARKHYPNY

SEQ ID NO: 3323 - protein, 19 aa, Thermosynechococcus elongatus
ASVVPQERQQVARKHYPNY

SEQ ID NO: 3324 - protein, 95 aa, Thermosynechococcus elongatus; identical to SEQ ID NO: 165

SEQ ID NO: 3325 - protein, 95 aa, Thermosynechococcus elongatus
ASVVPQERQQVARKHYPNSKVIVLNDDFNTFRHVAACLMKYIPNMTSDRAWELTNQVHYEGQAIVWVGPQVQAELYHEQLLRAGLTMAPLEPGGS

SEQ ID NO: 3326 - protein, 95 aa, Thermosynechococcus elongatus
ASVVPQERQQVARKHYPNSKVIVVNDDFNTFRHVAACLMKYIPHMSSDRAWELTNQVHYEGQAIVWVGPQVPAELDHEQLLRAGLPRAPLEPGGS

SEQ ID NO: 3327 - protein, 95 aa, Thermosynechococcus elongatus; identical to SEQ ID NO: 3325

SEQ ID NO: 3328 - protein, 95 aa, Thermosynechococcus elongatus
ASVVPQERQQVARKHYPNSKVIVLNDDFNTFRHVAACLMKYIPNMTSDRAWDLTNQVHYEGQAIVWVGPQVQAELYHEQLLRAGLTMAPLEPGGS

SEQ ID NO: 3329 - protein, 95 aa, Thermosynechococcus elongatus
ASVVPQERQQVARKHYPNSKVLVLNDDFNTFRHVAACLMKYIPNMTSDRAWELTNQVHYKGQAIVWVGPQEQAELNHEQLLRAGLTMAPLEPEGS

SEQ ID NO: 3330 - protein, 95 aa, Thermosynechococcus elongatus
ASVVPQERQQVARKHYPNCKVIVLNDDFNTFRHVAACLMKYIPNKTSDRAWELTNQVHYEGQAIVWVGPQEQAELYHEQLLRAGLTMAPLEPEGS

SEQ ID NO: 3331 - protein, 95 aa, Thermosynechococcus elongatus
ASVVPQERQQVARKHYPNCKVIVLNDDFNTFRHVAACLMKYIPNMTSDRAWELTNQVHYEGQAIVWVGPQEQAELYHEQLLRAGLTMAPLEPEGS

SEQ ID NO: 3332 - protein, 95 aa, Thermosynechococcus elongatus; identical to SEQ ID NO: 3

SEQ ID NO: 3333 - protein, 58 aa, Thermosynechococcus elongatus
ASVVPQERQQVARKHYPIYKVIVLNDDFNTFRHVAEFLMKYITNMTSDRAWELTNQVH

SEQ ID NO: 3334 - protein, 95 aa, Thermosynechococcus elongatus
ASVVPQERQQVARKHYPHYKVIVLNDDFNTFRHVAACLMKYIPNMTSDRAWELTNQVHYEGQAIVWVGPQVQAELYHEQLLRAGLTMAPLEPGGS

SEQ ID NO: 3335 - protein, 95 aa, Thermosynechococcus elongatus
ASVVPQERQQVARKHYPDYKVIVLNDDFNTFRHVAACLMKYIPNMTSDRAWELTNQVHYEGQAIVWVGPQVQAELYHEQLLRAGLTMAPLEPGGS

SEQ ID NO: 3336 - protein, 95 aa, Thermosynechococcus elongatus; identical to SEQ ID NO: 3335

SEQ ID NO: 3337 - protein, 40 aa, Thermosynechococcus elongatus
ASVVPQERQQVARKHYPNYKVIVLNDDFNTFRHVAACLKK

SEQ ID NO: 3338 - protein, 95 aa, Thermosynechococcus elongatus
ASVVPQERQQVARKHYPNSKVIVLNDDFNTFRHVAACLMKYIPNMTSDRAWELTNQVHYEGQAIVWVGPQEPAELYPEQVLRAGLTMAPLEPEGS

SEQ ID NO: 3339 - protein, 95 aa, Thermosynechococcus elongatus; identical to SEQ ID NO: 1286

SEQ ID NO: 3340 - protein, 95 aa, Thermosynechococcus elongatus; identical to SEQ ID NO: 3

SEQ ID NO: 3341 - protein, 95 aa, Thermosynechococcus elongatus; identical to SEQ ID NO: 38

SEQ ID NO: 3342 - protein, 95 aa, Thermosynechococcus elongatus
ASVVPQERQQVARKHYPNYKIIVLNDDFNTFQHVAACLMKYIPNMTSDRAWELTNQVHYEGQAIVWVGPQEQAELYHEQLLRAGLTMAPLEPEGS

SEQ ID NO: 3343 - protein, 95 aa, Thermosynechococcus elongatus
ASVVPQERQQVARKHYLNYKVIVLNDDFNTFRHVAACLMKYIPNMTSDRAWELTNQVHYEGQAIVWVGPQEQAELYHEQLLRAGLTMAPLEPEGS

SEQ ID NO: 3344 - protein, 95 aa, Thermosynechococcus elongatus
ASVVPQERQQVARKHYANYKVIVLNDDFNTFRHVAACLMKYIPNMTSDRAWELTNQVHYEGQAIVWVGPQVQAELYHEQLLRAGLTMAPLEPGGS

SEQ ID NO: 3345 - protein, 95 aa, Thermosynechococcus elongatus
ASVVPQERQQVARKHYSNYKVIVLNDDFNTFRHVAACLMKYIPNMTSDRAWELTNQVHYEGQAIVWVGPQVQAELYHEQLLRAGLTMAPLEPGGS

SEQ ID NO: 3346 - protein, 95 aa, Thermosynechococcus elongatus; identical to SEQ ID NO: 3

SEQ ID NO: 3347 - protein, 95 aa, Thermosynechococcus elongatus
ASVVPQERQQVARKPYPNYKVIVLNDDFNTFRHVAACLMKYIPNMTSDRAWELTNQVHYEGQAIVWVGPQVQAELYHEQLLRAGLTMAPLEPGGS

SEQ ID NO: 3348 - protein, 95 aa, Thermosynechococcus elongatus
ASVVPQERQQVARKPYPNYKVLVLNDDCTTFRHVAACLMKYIPNMTSDRAWELTNQVHYEGQAIVWVGPQEQAELYHEQLLRAGLTMAPLEPEGS

SEQ ID NO: 3349 - protein, 95 aa, Thermosynechococcus elongatus
ASVVPQERQQVARKRYPNYKVKVLNDDFNTFQHVVACLKKYIPNMISDRAWELTNQVHYGGRAIVWVGPQEQAELYHEQLLRAGLTMAPLEPEGS

SEQ ID NO: 3350 - protein, 95 aa, Thermosynechococcus elongatus
ASVVPQERQQVARKRYPNYKVIVLNDDFNTFRHVAACLMKYIPNMTSDRAWELTNQVHYGGRAIVWVGPQEQAELYHEQLLRAGLTMAPLEPEGS

SEQ ID NO: 3351 - protein, 95 aa, Thermosynechococcus elongatus
ASVVPQERQQVARKLYPNYKVIVLNDDFNTFRHVAACLMKYIPNMTSDRAWELTNQVHYEGQAIVLVGPQVQAELYHEPLLRAGLTMAPLEPGGS

SEQ ID NO: 3352 - protein, 95 aa, Thermosynechococcus elongatus
ASVVPQERQQVARKLYPNYKVIVLNDDFNTFRHVAACLMKYIPNMTSDRAWELTNQVHYEGQAIVWVGPQVQAELNHEQLLRAGLTMAPLEPEGS

SEQ ID NO: 3353 - protein, 95 aa, Thermosynechococcus elongatus
ASVVPQERQQVARKLYPNYKVIVLNDDFNTFRHVAACLMKYIPNMTSDRAWELTNQVHYEGQAIVWVGPQVQAELYHEQLLRAGLTMAPLEPEGS

SEQ ID NO: 3354 - protein, 95 aa, Thermosynechococcus elongatus
ASVVPQERQQVARKLYANYKVIVLNDDFNTFRHVAACLMKYIPNMTSDRAWELTNQVHYEGQAIVWVGPQVQAELYHEQLLRAGLTMAPLEPGGS

SEQ ID NO: 3355 - protein, 95 aa, Thermosynechococcus elongatus
ASVVPQERQQVARKYYPNYKVIVLNDDFNTFRHVAACLMKYIPNMTSDRAWELTNQVHYGGRAIVWVGPQEQAELYHEQLLRAGLTMAPLEPEGS

SEQ ID NO: 3356 - protein, 15 aa, Thermosynechococcus elongatus
ASVVPQERQQVARNH

SEQ ID NO: 3357 - protein, 95 aa, Thermosynechococcus elongatus
ASVVPQERQQVARNHYPNYKVIVLNDDFNTFRHVAACLMKYIPNMTSDRAWELTNQVHYEGQAIVWVGPQEQAELYHEQLLRAGLTMAPLEPEGS

SEQ ID NO: 3358 - protein, 95 aa, Thermosynechococcus elongatus
ASVVPQERQQVARNHYPTYKVIVLNDDFNTFRHVAACLMKYIPNMTSDRAWELTNQVHYEGQAIVWVGPQEQAELYHEQLLRAGLTMAPLEPEGS

SEQ ID NO: 3359 - protein, 95 aa, Thermosynechococcus elongatus
ASVVPQERQQVARTHYPNYKVIVLNDDFNTFRHVAACLMKYIPNKTSDRAWELTNQVHYVGQAIVWVGPQERAELYHEQLLRAGLTMAPLEPEGS

SEQ ID NO: 3360 - protein, 95 aa, Thermosynechococcus elongatus
ASVVPQERQQVARTHYPNYKVIVLNDDFNTFRHVAACLMKYIPNMTSDRAWELTNQVHYEGQAIVWVGPQVQAELYHEQLLRAGLTMAPLEPGGS

SEQ ID NO: 3361 - protein, 95 aa, Thermosynechococcus elongatus
ASVVPQERQQVARRHYPNYKVIVLNDDFNTFRHVAACLMKYIPNMTSDRAWELTNQVHYEGQAIVWVGPQVQAELYHEQLLRAGLTMAPLEPGGS

SEQ ID NO: 3362 - protein, 95 aa, Thermosynechococcus elongatus
ASVVPQERQQVARMHYPNYKVRVLNDDFNTFQHVVACLKKYIPNMISDRAWELTNQVHYGGRAIVWVGPQEQAELYHEHLLRAGLTMAPLEPEGS

SEQ ID NO: 3363 - protein, 95 aa, Thermosynechococcus elongatus
ASVVPQERQQVARMHYPNYKVIVLNDDFNTFRHVAACLMKYIPNKTSDRAWELTNQVHYEGQAIVWVGPQEQAELYHEQLLRAGLTMAPLEPEGS

SEQ ID NO: 3364 - protein, 95 aa, Thermosynechococcus elongatus
ASVVPQERQQVARMHYPNYKVIVLNDDFNTFRHVAACLMKYIPNMTSDRAWELTNQVHYEGQAIVWVGPQVQAELYHEQLLRAGLTMAPLEPGGS

SEQ ID NO: 3365 - protein, 95 aa, Thermosynechococcus elongatus
ASVVPQERQQVARQHYPNYKVIVLNDDFNTFRHVAACLMKYIPNMTSDRAWELTNQVHYEGQAIVWVGPQEQAELYHEQLLRAGLTMAPLEPEGS

SEQ ID NO: 3366 - protein, 95 aa, Thermosynechococcus elongatus
ASVVPQERQQVAREHYPNYKVIVLNDDFNTFRHVAACLMKYIPNMTSDRAWELTNQVHYEGQAIVWVGPQVQAELYHEQLLRAGLTMAPLEPGGS

SEQ ID NO: 3367 - protein, 13 aa, Thermosynechococcus elongatus
ASVVPQERQQVAR

SEQ ID NO: 3368 - protein, 95 aa, Thermosynechococcus elongatus; identical to SEQ ID NO: 6

SEQ ID NO: 3369 - protein, 95 aa, Thermosynechococcus elongatus; identical to SEQ ID NO: 3

SEQ ID NO: 3370 - protein, 95 aa, Thermosynechococcus elongatus
ASVVPQERQQVASKHYPNYKGIVLNDDFNTFRHVAACLMKYIPNMTSDRAWELTNQVHYEGQAIVWVGPQVQAELYHEQLLRAGLTMAPLEPGGS

SEQ ID NO: 3371 - protein, 95 aa, Thermosynechococcus elongatus
ASVVPQERQQVASKHYPNYKVIVLNDDFNTFRHVAACLMKYIPNMTSDRAWELTNQVHYKGQAIVWVGPQEQAELNHEQLLRAGLTMAPLEPEGS

SEQ ID NO: 3372 - protein, 95 aa, Thermosynechococcus elongatus
ASVVPQERQQVASKHYPNYKVIVLNDDFNTFRHVAACLMKYIPNMTSDRAWELTNQSHYEGQAIVWVGPQVQAELYHEQLLRAGLTMAPLEPGGS

SEQ ID NO: 3373 - protein, 95 aa, Thermosynechococcus elongatus
ASVVPQERQQVASKHYPNYKVIVLYDDFNTFRHVAACLMKYIPNMTSDRAWELTNQVHYEGQAIVWVGPQVQAELYHEQLLRAGLTMAPLEPGGS

SEQ ID NO: 3374 - protein, 95 aa, Thermosynechococcus elongatus
ASVVPQERQQVAIKHYPNYKVIVLNDDFNTIRHVAACLMKYIPNMTSDRAWELTNQVHYEGQAIVWVGPQEQAELYHEQLLRAGLTMAPLEPEGS

SEQ ID NO: 3375 - protein, 95 aa, Thermosynechococcus elongatus
ASVVPQERQQVAIKHYPNYKVIVLNDDFNTFRHVAACLMKYIPNMTSDRAWELTNQVHYEGQAIVWVGPQVQAELYHEQLLRAGLTMAPLEPGGS

SEQ ID NO: 3376 - protein, 95 aa, Thermosynechococcus elongatus
ASVVPQERQQVAIKHYPNYKVIVLNDDFNTFRHVAACLMKYIPNMTSDRAWELTNQVHYEGQSIVWVCPQVQAELYHEQLLRAGLTMAPLEPGGS

SEQ ID NO: 3377 - protein, 95 aa, Thermosynechococcus elongatus
ASVVPQERQQVAIKHYPNYKVLVLNDDFNTFRHVAACLMKYIPNMTSDRAWELTNQVHYEGQAIVWVGPQVQAELYHEQLLRAGLTMAPLEPGGS

SEQ ID NO: 3378 - protein, 95 aa, Thermosynechococcus elongatus; identical to SEQ ID NO: 21

SEQ ID NO: 3379 - protein, 95 aa, Thermosynechococcus elongatus; identical to SEQ ID NO: 1305

SEQ ID NO: 3380 - protein, 95 aa, Thermosynechococcus elongatus; identical to SEQ ID NO: 1330

SEQ ID NO: 3381 - protein, 95 aa, Thermosynechococcus elongatus; identical to SEQ ID NO: 54

SEQ ID NO: 3382 - protein, 95 aa, Thermosynechococcus elongatus; identical to SEQ ID NO: 35

SEQ ID NO: 3383 - protein, 95 aa, Thermosynechococcus elongatus
ASVVPQERQQVARKHYPNYKVIVLNDDFTTFRHVAACLMKYIPNMTSDRAWELTNQGHYKGQAIVWVGPQEQAELNHEQLLRAGLTMAPLEPEGS

SEQ ID NO: 3384 - protein, 95 aa, Thermosynechococcus elongatus
ASVVPQERQQVARKHYPNYTVIVLNDDFNTFQHVVACLKKYIPNMISDRAWELTNQVHYGGRAIVWVGPQEQAELYHEQLLRAGLTMAPLEPEGS

SEQ ID NO: 3385 - protein, 95 aa, Thermosynechococcus elongatus
ASVVPQERQQVAGKHYPNYKVIVLNDDFNTFRHVAACLMKYIPNMTSDRAWELTNQVHYEGQAIVWVGPQVQAELYHEQLLRAGLTMAPLEPEGS

SEQ ID NO: 3386 - protein, 95 aa, Thermosynechococcus elongatus
ASVVPQERQQVVRKHYPNYKVIVLNDDFNTFQHVVACLKKYIPNMISDRAWELTNQVHYGGRAIVWVGPQEQAELNHEQLLRAGLTMAPLEPEGS

SEQ ID NO: 3387 - protein, 95 aa, Thermosynechococcus elongatus
ASVVPQERQQVVRKHYPNYKVIVLNDDFNTFRHVAACLMKYIPNMTSDRAWELTNQVHYEGQAIVWVGPQVQAELYHEQLLRAGLTMAPLEPEGS

SEQ ID NO: 3388 - protein, 95 aa, Thermosynechococcus elongatus
ASVVPQERQQFARKHYTNYKVIVLNDDFNTFRHVAACLMKYIPNMTSDRAWELTNQVHFEGQAIVWVGPQVLAELYHEQLLRAGLTMAPLEPGGS

SEQ ID NO: 3389 - protein, 95 aa, Thermosynechococcus elongatus
ASVVPQERQQFARKHYPNYKGIVLNDDFNTFRHVAACLMKYIPNMTSDRAWELTNQVHYEGQAIVWVGPQVQAELYHEQLLRAGLTMAPLEPGGS

SEQ ID NO: 3390 - protein, 23 aa, Thermosynechococcus elongatus
ASVVPQERQQFARKHYPNYKVID

SEQ ID NO: 3391 - protein, 95 aa, Thermosynechococcus elongatus
ASVVPQERQQFARKHYPNYKVIVLNDDFNNFRHVAACLMKYIPNMTSDRAWELTNKVHYEGQAIVWVGTQVQAELFHEQLLRAGLTMAPLEPGGS

SEQ ID NO: 3392 - protein, 95 aa, Thermosynechococcus elongatus
ASVVPQERQQFARKHYPNYKVIVLNDDFNTFRHVAACLMNYIPNMTSDRAWELTNQFHFEGLAIVWVGPQLQAELFHEHLLRAGLTLAPLEPGGS

SEQ ID NO: 3393 - protein, 95 aa, Thermosynechococcus elongatus
ASVVPQERQQFARKHYPNYKVIVLNDDFNTFRHVAACLMKYIPNMTSDRAWELTNQVHYEGQAIVWVGPQEQAELYHEQLLRAGLTMAPLEPEGS

SEQ ID NO: 3394 - protein, 95 aa, Thermosynechococcus elongatus
ASVVPQERQQFARKHYPNYKVIVLNDDFNTFRHVAACLMKYIPNMTSDRAWELTNQVHYEGQAIVWVGPQVQAELYHEQLLRAGLTMAPLELGGS

SEQ ID NO: 3395 - protein, 95 aa, Thermosynechococcus elongatus
ASVVPQERQQFARKHYPNYKVIVLNDDFITFRHLAACLMKYIPNMTSDRAWELTNQVQYEGQAIVWVGPQVQAVLYHEHLLRAGLTMAPLEPGGS

SEQ ID NO: 3396 - protein, 95 aa, Thermosynechococcus elongatus
ASVVPQERQQFARKHYPNYKVIFLNDDFNTFRHVAACLMKYIPNMTSDRAWELTNQVHYEGQAIVWVGPQVQAELYHEQLLRAGLTMAPLEPGGS

SEQ ID NO: 3397 - protein, 95 aa, Thermosynechococcus elongatus
ASVVPQERQHVARKHDPNYKGRVLNDDCNTFRHVAACLMKDIPNMTSDRAWELTNHVHDTGQAIVWVGPQEQAELNHEQLLRAGLTMAPLEPEGS

SEQ ID NO: 3398 - protein, 95 aa, Thermosynechococcus elongatus; identical to SEQ ID NO: 1718

SEQ ID NO: 3399 - protein, 95 aa, Thermosynechococcus elongatus
ASVVPQERQQVARKHYPNYKVIVLNDDFNTFRHVAACLMKYIPNMTSDRAWELTNQVHYKGRAIVWVGPQEQAELYHEQLLRAGLTMAPLEPEGS

SEQ ID NO: 3400 - protein, 95 aa, Thermosynechococcus elongatus; identical to SEQ ID NO: 1360

SEQ ID NO: 3401 - protein, 95 aa, Thermosynechococcus elongatus
ASVVPQERQHVARKHYPNYKLIVLNDDFNTFQHVVACLKKYIPNMISDRAWELTNQVHYGGRAIVWVGPQEQAELYHEQLLRAGLTMAPLEPEGS

SEQ ID NO: 3402 - protein, 95 aa, Thermosynechococcus elongatus
ASVVPQERQEVARKHYPNYKVIVLNDDFNTFRHVAACLMKYIPNMTSDRAWELTNQVHYEGQAIVWVGPQVQAELYHEQLLRAGLTMAPLEPGGS

SEQ ID NO: 3403 - protein, 95 aa, Thermosynechococcus elongatus
ASVVPQERHQDTRKHYPNYKDIVLNHDYNTYRHYAACLMKYIPNKTSDRAWELTNQLHYVGLAIVWVGPQEQAELYLEQLLRAGLSMAPLEPEGS

SEQ ID NO: 3404 - protein, 95 aa, Thermosynechococcus elongatus
ASVVPQERHQDTRKHYPNYKVIFLNDDFNTFRHVAACLIKYIPNMTSDRAWELTNQVHYEGQAIVWVGPQVQAELYHEQLLRAGLTMAPLEPGGS

SEQ ID NO: 3405 - protein, 95 aa, Thermosynechococcus elongatus
ASVVPQERHQVTRKHYPNYKVIVLNDDFNTFQHVVACLKKYIPNMISDRAWELTNQVHYGGRAIVWVGPQEQAELYHEQLLRAGLTMAPLEPEGS

SEQ ID NO: 3406 - protein, 95 aa, Thermosynechococcus elongatus
ASVVPQERHQVARKHYPNYKVIVLNDDFNTFRHVAACLMKYIPNMTSDRACELTNQLHYERQAIVWVGPQVQAELYPAQLLRAGLTMAPLEPGGS

SEQ ID NO: 3407 - protein, 95 aa, Thermosynechococcus elongatus
ASVVPQERHQVARKHYPNYKVIVLNDDFNTFRHVAACLMKYIPNMTSDRAWELTNQVHYEGQAIVWVGPQVQAELDHDQLLRAGLTMAPLEPEGS

SEQ ID NO: 3408 - protein, 95 aa, Thermosynechococcus elongatus
ASVVPQERHQVARKHYPNYKVIVLNDDFNTFRHVAACLMKYIPNMTSDRAWELTNQVHYEGQAIVWVGPQVQAELYHEQLLRAGLTMATLEPGGS

SEQ ID NO: 3409 - protein, 95 aa, Thermosynechococcus elongatus
ASVVPQERQKDTRKHYPNYKVIVLNDDFNTFRHVAACLMKYIPNMTSDRAWELTNQVHYKGQAIVWVGPQEQAELNHEQLLRAGLTMAPLEPEGS

SEQ ID NO: 3410 - protein, 95 aa, Thermosynechococcus elongatus; identical to SEQ ID NO: 1384

SEQ ID NO: 3411 - protein, 95 aa, Thermosynechococcus elongatus
ASVVPQERQKDTRKHYPNYKVIVLNDDFNTFRHVAACLMKYIPNMTSDRAWELTNQVHYEGRAIVWVGPQEQAELYHEQLLRAGLTMAPLEPEGS

SEQ ID NO: 3412 - protein, 15 aa, Thermosynechococcus elongatus
ASVVPQERQKDTRNH

SEQ ID NO: 3413 - protein, 95 aa, Thermosynechococcus elongatus
ASVVPQERQKVTRKHYPNYKVIVLNDDFNTFRHVAACLMKYIPNMTSDRAWELTNQVHYEGQAIVWVGPQVQAELYHEQLLRAGLTMAPLEPGGS

SEQ ID NO: 3414 - protein, 95 aa, Thermosynechococcus elongatus
ASVVPQERQKVTRKHYPNYKVIVLNDDFNTFRHVAACLMKYIPNMTSDRAWELTNQVHYGGRAIVWVGPQEQAELNHEQLLRAGLTMAPLEPEGS

SEQ ID NO: 3415 - protein, 95 aa, Thermosynechococcus elongatus
ASVVPQERQQNTRKHYPNYKVIVLNDDFNTFRHVAACLMKYIPNMTSDRAWELTNQVHYEGQAIVWVGPQEQAELYHEQLLRAGLTMAPLEPEGS

SEQ ID NO: 3416 - protein, 37 aa, Thermosynechococcus elongatus
ASVVPQERQQETRKHYPNYKDIVLNDDFNTFRHVAAS

SEQ ID NO: 3417 - protein, 95 aa, Thermosynechococcus elongatus
ASVVPQERQQETRKHYPNYKGIVLYDDFNTFRHVAACLMKYIPNMTSDRAWELTNQVHYEGQAIVWVGPQEQAELYHEQLVRAGLTIAPLEPEGS

SEQ ID NO: 3418 - protein, 95 aa, Thermosynechococcus elongatus
ASVVPQERQQETRKHYPNYKVIVLNDDFNTFRHDAECLMKYIPNMTSDRAWELTNQVHYVGQAIVWVGPLEQAELYHEHLLRAGLTMAPFETEGS

SEQ ID NO: 3419 - protein, 95 aa, Thermosynechococcus elongatus
ASVVPQERQQETRKHYPNYKVIVLNDDFNTFRHVAACLMKYIPNMTSDRAWELTNQVHYEGQAIVWVGPQEQAELYHEQLLRAGLTMAPLEPEGS

SEQ ID NO: 3420 - protein, 95 aa, Thermosynechococcus elongatus
ASVVPQERQQETRKHYPNYNVIVLNDDFNTFRHVAACLMKYIPNMTSDRAWELTNQVHYEGQAIVWVGPQEQAELYHEQLLRTGLTMAPLEPEGS

SEQ ID NO: 3421 - protein, 95 aa, Thermosynechococcus elongatus; identical to SEQ ID NO: 4

SEQ ID NO: 3422 - protein, 95 aa, Thermosynechococcus elongatus; identical to SEQ ID NO: 2

SEQ ID NO: 3423 - protein, 95 aa, Thermosynechococcus elongatus
ASVVPQERQQETRKHYPNYKVIVLNDDFNTYRHVAACLMKYIPNMTSDRAWELTNQVHFECLAIVWVGPQVQAELYQEQLLRAGLTIAPLDPEGS

SEQ ID NO: 3424 - protein, 95 aa, Thermosynechococcus elongatus
ASVVPQERQQETRKHYPNYKVIVLNDDFNTFRHGAACLMKYIPNKTSDRAWELTNQVHYEGQAIVWVGPQEQAELYHEQLLRAGLTMAPLEPEGS

SEQ ID NO: 3425 - protein, 95 aa, Thermosynechococcus elongatus; identical to SEQ ID NO: 3419

SEQ ID NO: 3426 - protein, 95 aa, Thermosynechococcus elongatus
ASVVPQERQQETRKHFPNYKVIVLNDDFNTFRHVAACLMKYIPNMTSDRAWELTNQVHYEGQAIDWVGPQEQAELYHEQLLRAGLTMAPLEPEGS

SEQ ID NO: 3427 - protein, 95 aa, Thermosynechococcus elongatus
ASVVPQERQQETRQHYPNYKVIVLNDDFNTFRHVAACLMKYIPNKTSDRAWELTNQVHYGGRSIVLVGPQEQAELYHEQLLRAGLTIAPLEPEGS

SEQ ID NO: 3428 - protein, 95 aa, Thermosynechococcus elongatus
ASVVPQERQQDNRKHYPNYKVIVLNDDFNTFRHVAACLMKYITNMNSDRAWELTNQVHYEGQAIVWVGPQEQAELYHEQLLRAGLTMAPLEPEGS

SEQ ID NO: 3429 - protein, 95 aa, Thermosynechococcus elongatus
ASVVPQERQQDNRKHYPNYKVIVLNDDFNTFRHVAACLMKYIPNKTSDRAWELTNQVHYEGQAIVWVGPQEQAELYHEQLLRAGLTMAPLEPEGS

SEQ ID NO: 3430 - protein, 95 aa, Thermosynechococcus elongatus
ASVVPQERQQDNRKHYPNYKVIVLNDDFNTFRHVAACLMKYIPNMTSDRAWELTNQVHYEGQAIVWVGPQVQAELYHEQLLRAGLTMAPLEPGGS

SEQ ID NO: 3431 - protein, 36 aa, Thermosynechococcus elongatus
ASVVPQERQQDNRKHYPNYKVIFFNEELKTFRKVDS

SEQ ID NO: 3432 - protein, 95 aa, Thermosynechococcus elongatus
ASVVPQERQQDTRKHNPNYKVIVLNDDFNTFQHVVACLKKYIPNMISDRAWELTNQVHYGGRAIVWVGPQEQAELYHEQLLRAGLTMAPLEPEGS

SEQ ID NO: 3433 - protein, 95 aa, Thermosynechococcus elongatus; identical to SEQ ID NO: 916

SEQ ID NO: 3434 - protein, 95 aa, Thermosynechococcus elongatus
ASVVPQERQQDTRKHYPNYKVIVLNDDFNTFRHVAACVMKYIPNMTSDRAWELTNQVHYEGQAIVWVGPQEQAELYHEQLLRAGLTMAPLEPGGS

SEQ ID NO: 3435 - protein, 95 aa, Thermosynechococcus elongatus; identical to SEQ ID NO: 4

SEQ ID NO: 3436 - protein, 95 aa, Thermosynechococcus elongatus
ASVVPQERQQDTRKHYPNYKDIVLNDDFNTFRHVAACLMKYIPNMTSDRDWELTNQVLYEGQAIVWVGTQVQAELFLEQLLRAGLTMAPLEPGGS

SEQ ID NO: 3437 - protein, 95 aa, Thermosynechococcus elongatus; identical to SEQ ID NO: 2

SEQ ID NO: 3438 - protein, 95 aa, Thermosynechococcus elongatus; identical to SEQ ID NO: 7

SEQ ID NO: 3439 - protein, 95 aa, Thermosynechococcus elongatus
ASVVPQERQQDTRKHYPNYKVIDLNDDFNTFRHVAACLMKYIPNMTSDRAWELTNQVHSEGQAIVWVGPQEQAELYHEHLLRAGLTMAPLEPEGS

SEQ ID NO: 3440 - protein, 95 aa, Thermosynechococcus elongatus
ASVVPQERQQDTRKHYPNYKVIVLNDDFNTFRHGAACLMKYIPNMTSDRAWELTNQVHYEGQAIVWVGPQEQAELYHEQLLRAGLTMAPLEPEGS

SEQ ID NO: 3441 - protein, 95 aa, Thermosynechococcus elongatus; identical to SEQ ID NO: 2

SEQ ID NO: 3442 - protein, 95 aa, Thermosynechococcus elongatus
ASVVPQERQQDTRMHYPIYEGIVLNDDFNTFQHVVACLKKYIPNKTSDRAWELTNQVHYEGQAIVWVGPQEQAELYHEQLLRAGLTMAPLEPEGS

SEQ ID NO: 3443 - protein, 95 aa, Thermosynechococcus elongatus
ASVVPQERQQDTKKHYPNYKVIVLNDDFNTFQHVVACLKKYIPNMISDRAWELTNQVHYGGRAIVWVGPQEQAELYHEQLLRAGLTMAPLEPEGS

SEQ ID NO: 3444 - protein, 95 aa, Thermosynechococcus elongatus; identical to SEQ ID NO: 2

SEQ ID NO: 3445 - protein, 95 aa, Thermosynechococcus elongatus
ASVVPQERQQDTRNHYPNYKVIVLNDDFNTFRHVAACLMKYIPNMTSDRAWELTNQVHYKGQAIVWVGPQEQAELNHEQLLRAGLTMAPLEPEGS

SEQ ID NO: 3446 - protein, 77 aa, Thermosynechococcus elongatus
ASVVPQERQQDTRKNYPNYKVIVLNDDFNTFRHVAACLMKYIPNKTSDRAWELTNQVHYEGQAIVWVGPQEQAELYH

SEQ ID NO: 3447 - protein, 95 aa, Thermosynechococcus elongatus
ASVVPQERQQDTRKNYPNYKVIVLNDDFNTFRHVAACLMKYIPNKTSDRAWELTNQVHYVGQAIVWVGPQERAELYHEQLLRAGLTMAPLEPEGS

SEQ ID NO: 3448 - protein, 95 aa, Thermosynechococcus elongatus
ASVVPQERQQDTRKNYPNYKVIVLNDDFNTFRHVAACLMKYIPNMTSDRAWELTNQGHYEGQAIVWVGPQEQAELYHEQLWRAGLTMAPLEPEGS

SEQ ID NO: 3449 - protein, 95 aa, Thermosynechococcus elongatus
ASVVPQERQQDTRKNYPNYKVIVLNDDFNTFRHVAACLMKYIPNMTSDRAWELTNQVHYEGQAIVWVGPQEQAELYHEQLLRAGLTMAPLEPEGS

SEQ ID NO: 3450 - protein, 95 aa, Thermosynechococcus elongatus
ASVVPQERQQDTRKQYPNYKVIVLNDDFNTFRHVAACLMKYIPNKTSDRAWELTNQVHYEGQAIVWVGPQEQAELYHERLLRAGLTMAPLEPEGS

SEQ ID NO: 3451 - protein, 18 aa, Thermosynechococcus elongatus
ASVVPQERQQDTRKHNPN

SEQ ID NO: 3452 - protein, 95 aa, Thermosynechococcus elongatus
ASVVPQERQQDTRKHNPNYKVIVLNDDINTFRHVAACLMKYIPNMTSDRAWELTNQVHYEGQAIVWVGPQEQAELYHEQLLRAGLTMAPLEPEGS

SEQ ID NO: 3453 - protein, 36 aa, Thermosynechococcus elongatus
ASVVPQERQQDTRKHNPNYKVIVMNDDINTIRHDAA

SEQ ID NO: 3454 - protein, 95 aa, Thermosynechococcus elongatus; identical to SEQ ID NO: 1391

SEQ ID NO: 3455 - protein, 95 aa, Thermosynechococcus elongatus
ASVVPQERQQDTRKHNPNYKVIVLNDDFNTFRHGAACLMKYIPNMTSDRAWELTNQVHYEGQAIVWVGPQEQAELYHEQLLRAGLTMAPLEPGGS

SEQ ID NO: 3456 - protein, 95 aa, Thermosynechococcus elongatus
ASVVPQERQQDTRKHNPNYKVIVLNDDFNTFRHVAACLMKYIPNMTSDRAWELTNQVHYGGRAIVWVGPQEQAELYHEQLLRAGLTMAPLEPEGS

SEQ ID NO: 3457 - protein, 95 aa, Thermosynechococcus elongatus
ASVVPQERQQDTRKHHPNYKVIVLNDDFNTFQHVVACLKKYIPNMISDRAWELTNQVHYGGRAIVWVGPQEQAELYHEQLLRAGLTMAPLEPEGS

SEQ ID NO: 3458 - protein, 95 aa, Thermosynechococcus elongatus
ASVVPQERQQDTRKHHPNYKVIVLNDDFNTFRHVAACLKKYIPNMISDRAWELTNQVHYGGRAIVWVGPQEQAELYHEQLLRAGLTMAPLEPEGS

SEQ ID NO: 3459 - protein, 95 aa, Thermosynechococcus elongatus
ASVVPQERQQDTRKHHPNYKVIVLNDDFNTFRHVAACLMKYIPNMTSDRAWELTNQVHYEGQAIVWVGPQEQAELYHEQLLRAGLTMAPLEPGGS

SEQ ID NO: 3460 - protein, 95 aa, Thermosynechococcus elongatus
ASVVPQERQQDTRKHHPNYKVIVLNDDFNTFRHVAACLMKYIPNMTSDRAWELTNQVHYEGQAIVWVGPQEQAELYHEQLLRAGLTMASLEPEGS

SEQ ID NO: 3461 - protein, 95 aa, Thermosynechococcus elongatus
ASVVPQERQQDTRKHHPNYKVIVLNDDFNTFRHVAACLMKYIPNMTSDRAWELTNQVHYEGQAIVWVGPQVQAELYHEQLLRAGLTMAPLEPGGS

SEQ ID NO: 3462 - protein, 95 aa, Thermosynechococcus elongatus
ASVVPQERQQDTRKHHPNYKVIVLNDDFNTFRHVAACLMKYIPNMTSDRAWELTNQVHYKGQAIVWVGPQEQAELNHEQLLRAGLTMAPLEPEGS

SEQ ID NO: 3463 - protein, 95 aa, Thermosynechococcus elongatus
ASVVPQERQQDTRKHHPNYKVIVLNDDFNTFRHVAACFMKYIPNMTSDRAWELTNQVHYEGQAIVWVGPQEQAELYHEQLLRAGLTMAPLEPEGS

SEQ ID NO: 3464 - protein, 95 aa, Thermosynechococcus elongatus
ASVVPQERQQDTRKHHPNYKVIVLNDDFNTFQHVVACLKKYIPNMTSDRAWELTNQVHYEGQAIVWVGPQVQAELYHEQLLRAGLTMAPLEPGGS

SEQ ID NO: 3465 - protein, 95 aa, Thermosynechococcus elongatus; identical to SEQ ID NO: 3457

SEQ ID NO: 3466 - protein, 95 aa, Thermosynechococcus elongatus; identical to SEQ ID NO: 3459

SEQ ID NO: 3467 - protein, 95 aa, Thermosynechococcus elongatus; identical to SEQ ID NO: 3461

SEQ ID NO: 3468 - protein, 95 aa, Thermosynechococcus elongatus
ASVVPQERQQDTRKHDPNYKVIVLNDDFNTFRHVAACLMKYIPNKTSDRAWELTNHVHYEGQAIVWVGPPEQAELYHEHLWRAGLPMAPLEPGGS

SEQ ID NO: 3469 - protein, 21 aa, Thermosynechococcus elongatus
ASVVPQERQQDTRKHYQTTRL

SEQ ID NO: 3470 - protein, 15 aa, Thermosynechococcus elongatus
ASVVPQERQQDTRKH

SEQ ID NO: 3471 - protein, 15 aa, Thermosynechococcus elongatus
ASVVPQERQQDTRKH

SEQ ID NO: 3472 - protein, 15 aa, Thermosynechococcus elongatus
ASVVPQERQQDTRKH

SEQ ID NO: 3473 - protein, 15 aa, Thermosynechococcus elongatus
ASVVPQERQQDTRKH

SEQ ID NO: 3474 - protein, 15 aa, Thermosynechococcus elongatus
ASVVPQERQQDTRKH

SEQ ID NO: 3475 - protein, 95 aa, Thermosynechococcus elongatus
ASVVPQERQQDTRKHYTNYKVIVLNDDFNTFRHDAACLMKYIPNMTSDRAWELTNQVHYEGLAIVWVGPQEQAELYHEQLLSAGLTMAPLEPEGS

SEQ ID NO: 3476 - protein, 95 aa, Thermosynechococcus elongatus
ASVVPQERQQDTRKHYTNYKVIVLNDDFNTFRHVAACLMKYIPNKTSDRAWELTNKVHYEGQAIVWVGPQEQAELYHEHLLRAGLTLAPLEPEGS

SEQ ID NO: 3477 - protein, 95 aa, Thermosynechococcus elongatus
ASVVPQERQQDTRKHYTNYKVIVLNDDFNTFRHVAACLMKYIPNKTSDRAWELTNQVHYKGQAIVWVGPQEQAELNHEQLLRAGLTMAPLEPEGS

SEQ ID NO: 3478 - protein, 95 aa, Thermosynechococcus elongatus
ASVVPQERQQDTRKHYTNYKVIVLNDDFNTFRHVAACLMKYIPNMTSDRAWELTNQVHYEGQAIVWVGPQVQAELYHEQLLRAGLTMAPLEPEGS

SEQ ID NO: 3479 - protein, 95 aa, Thermosynechococcus elongatus
ASVVPQERQQDTRKHYTNYKVIVLNDDFNTFRHVAACLMKYIPNMTSDRAWELTNQVHYKGQAIVWVGPQEQAELNHEQLLRAGLTMAPLEPEGS

SEQ ID NO: 3480 - protein, 95 aa, Thermosynechococcus elongatus
ASVVPQERQQDTRKHYTNYKVIVLNDDFNTFRHVVACLKKYIPNMISDRAWELTNQVHYGGRAIVWVGPQEQAELYHEQLLRAGLTMAPLEPEGS

SEQ ID NO: 3481 - protein, 95 aa, Thermosynechococcus elongatus
ASVVPQERQQDTRKHYTNYKVIVLNDDFNTFRHFAACLMKYIPNMTSDRAWELTNQVHYEGQAIVWVGPQEQAELYHEQLLRAGLTMAPLEPEGS

SEQ ID NO: 3482 - protein, 95 aa, Thermosynechococcus elongatus
ASVVPQERQQDTRKHYQNYKVIVLNDDFNTFRHVAACLTKYIPNMTSDRAWELTNQVHYEGQAIVWVGPQEQAELYHEQLLRAGLTMAPLEPEGS

SEQ ID NO: 3483 - protein, 95 aa, Thermosynechococcus elongatus; identical to SEQ ID NO: 287

SEQ ID NO: 3484 - protein, 95 aa, Thermosynechococcus elongatus
ASVVPQERQQDTRKHYQNYKVIVLNDDFNTFRHVAACLMKYIPNMTSDRAWELTNQVHYGGRAIVWVGPQEQAELYHEQLLRAGLTMAPLEPEGS

SEQ ID NO: 3485 - protein, 95 aa, Thermosynechococcus elongatus
ASVVPQERQQDTRKHYQNYKVIVLNDDFNTFRHVAACLMKYIPNMTSDRAWELTNQVHYVGQAIVWVGQQEQAELYHEQLLRAGLTMAPLEPKGS

SEQ ID NO: 3486 - protein, 95 aa, Thermosynechococcus elongatus
ASVVPQERQQDTRKHYQNYKVIVLNDDFNTFRHVAACLMKYIPNMTSDRAWELTNQVHYKGQAIVWVGPQEQAELNHEQLLRAGLTMAPLEPGGS

SEQ ID NO: 3487 - protein, 36 aa, Thermosynechococcus elongatus
ASVVPQERQQDTRKHYPKYKVIVLNEDFNTFRHVDE

SEQ ID NO: 3488 - protein, 95 aa, Thermosynechococcus elongatus
ASVVPQERQQDTRKHYPNNKVIVLNDDFNTIRHVAACLMKYIPNMTSDRASELTNQVHYEGQAIVWVGPQEQAELYHEQLLRAGLTMAPLEPEGS

SEQ ID NO: 3489 - protein, 95 aa, Thermosynechococcus elongatus
ASVVPQERQQDTRKHYPNNKVIVLNDDFNTLRHVSACLMKYIPNMTSDRAWELTNQVHYEGQAIVWVGPQEQAELYHEQLLRAGLTMAPLEPEGS

SEQ ID NO: 3490 - protein, 95 aa, Thermosynechococcus elongatus
ASVVPQERQQDTRKHYPNNKVIVLNDDFNTFPHVAASLMKYIPNMTSDRAWELTNQGHYEGQAIVWVGPQEQAELNHEQLLRAGLTMAPLEPEGS

SEQ ID NO: 3491 - protein, 95 aa, Thermosynechococcus elongatus
ASVVPQERQQDTRKHYPNNKVIVLNDDFNTFRHVAACLMKYIPNKTSDRAWELTNQVHYEGQAIVWVGPQEQAELYHEQLLRAGLTMAPLEPEGS

SEQ ID NO: 3492 - protein, 95 aa, Thermosynechococcus elongatus; identical to SEQ ID NO: 3491

SEQ ID NO: 3493 - protein, 95 aa, Thermosynechococcus elongatus
ASVVPQERQQDTRKHYPNNKVIVLNDDFNTFRHVAACLMKYIPNMTSDRAWELTNQVHYGGRAIVWVGPQEQAELYHEQLLRAGLTMAPLEPEGS

SEQ ID NO: 3494 - protein, 36 aa, Thermosynechococcus elongatus
ASVVPQERQQDTRKHYPNNNVIVLNDDFNTFRHDAA

SEQ ID NO: 3495 - protein, 95 aa, Thermosynechococcus elongatus
ASVVPQERQQDTRKHYPNHKVIVLNDDFNTFRHVAACLMKYIPNMTSDRAWELTNQVHYEGQAIVWVGPQEQAELYHEQLLRAGLTMAPLEPEGS

SEQ ID NO: 3496 - protein, 95 aa, Thermosynechococcus elongatus
ASVVPQERQQDTRKHYPNDKVIVLNDDFNTFRHVAACLMKYIPNMTSDRAWELTNQVHYEGQAIVWVGPQEQAELYHEQLLSAGLTMAPLEPEGS

SEQ ID NO: 3497 - protein, 18 aa, Thermosynechococcus elongatus
ASVVPQERQQDTRKHYPN

SEQ ID NO: 3498 - protein, 18 aa, Thermosynechococcus elongatus
ASVVPQERQQDTRKHYPN

SEQ ID NO: 3499 - protein, 21 aa, Thermosynechococcus elongatus
ASVVPQERQQDTRKHYPNYRL

SEQ ID NO: 3500 - protein, 95 aa, Thermosynechococcus elongatus; identical to SEQ ID NO: 2

SEQ ID NO: 3501 - protein, 95 aa, Thermosynechococcus elongatus; identical to SEQ ID NO: 18

SEQ ID NO: 3502 - protein, 95 aa, Thermosynechococcus elongatus; identical to SEQ ID NO: 2

SEQ ID NO: 3503 - protein, 95 aa, Thermosynechococcus elongatus; identical to SEQ ID NO: 42

SEQ ID NO: 3504 - protein, 95 aa, Thermosynechococcus elongatus
ASVVPQERQQDTRKHYPNYKVIVLNDDFNTFRHVAAFLMKYIPNMTSDRAWELTNQVHYGGRAIVWVGPQEQAELYHEQLLRAGLTMAPLEPEGS

SEQ ID NO: 3505 - protein, 95 aa, Thermosynechococcus elongatus; identical to SEQ ID NO: 63

SEQ ID NO: 3506 - protein, 95 aa, Thermosynechococcus elongatus
ASVVPQERQQDTRKHYPNYKDIILNDDFNTFQHVAACLMKYIPNMTSDRAWELTNQVHYEGQAIVRVGPQEQAELYHKQLLSAGLTMAPLEPEGS

SEQ ID NO: 3507 - protein, 23 aa, Thermosynechococcus elongatus
ASVVPQERQQDTRKHYPNYKDID

SEQ ID NO: 3508 - protein, 95 aa, Thermosynechococcus elongatus
ASVVPQERQQDTRKHYPNYKDIDLNDDFNTFQHDVACLKKYIPNMISDRAWELTNQVHYGGRAIVWVGPQEQAELYHEQLLRAGLSLAPLEPEGS

SEQ ID NO: 3509 - protein, 95 aa, Thermosynechococcus elongatus
ASVVPQERQQDTRKHYPNYKDIGLNDDFNTFRHVAACLMKYIPNKTSDRAWELTNQVHYDGQAIVWVGPQEQAELYHQQLLRAGLTMPPLEPEGS

SEQ ID NO: 3510 - protein, 75 aa, Thermosynechococcus elongatus
ASVVPQERQQDTRKHYPNYKDIVLNDDYNTNRHVAPCLMKYIPNMTSDRAWELTNQVHYEGLAIVWVGPQEQAEL

SEQ ID NO: 3511 - protein, 95 aa, Thermosynechococcus elongatus
ASVVPQERQQDTRKHYPNYKDIVLNDDFNTIRHVAACLMKYIPNMTSDRAWELTNQVHYEGQAIVWVGPQEQAELYHAQFLRAGLTMAPLEPEGS

SEQ ID NO: 3512 - protein, 73 aa, Thermosynechococcus elongatus
ASVVPQERQQDTRKHYPNYKDIVLNDDFNTYRHVAACLMKYIPNMTSDRAWDLTNQVQYECQAIVLVGPLELD

SEQ ID NO: 3513 - protein, 95 aa, Thermosynechococcus elongatus
ASVVPQERQQDTRKHYPNYKDIVLNDDYNTIRHVAACLMKYITNMTSDRAWELTNQVQYEGQAIVWVGPQEQAVLYHEHLLRAGLSMAPLEPEGS

SEQ ID NO: 3514 - protein, 95 aa, Thermosynechococcus elongatus
ASVVPQERQQDTRKHYPNYKDIVLNDDFNTIRHVAACLMKYIPNKTSDRAWELTNQVHYKGLAIVWVGPQVQAELFHDQLLRAGLTRAPLVPVGS

SEQ ID NO: 3515 - protein, 95 aa, Thermosynechococcus elongatus
ASVVPQERQQDTRKHYPNYKDIVLNDDFNTIRHVAACLMKYIPNMTSDRAWELTNQVHYEGQAIVWVGPQEQAELYHEQLLRAGLTMAPLEPEGS

SEQ ID NO: 3516 - protein, 95 aa, Thermosynechococcus elongatus
ASVVPQERQQDTRKHYPNYKDIVLNDDFNTYRHVAACLMKYIPNMTSDRAWEYTNQVHYEGQAIVWVGPQVQAELYHEQLLRAGLTMAPLEPGGS

SEQ ID NO: 3517 - protein, 95 aa, Thermosynechococcus elongatus
ASVVPQERQQDTRKHYPNYKDIVLNDDFNTYRHVAACLMKYIPNMTSDRAWELTNQVHYEGQAIVWVGPQEQAELYNVQFLRAGLTMAPLEAEGS

SEQ ID NO: 3518 - protein, 80 aa, Thermosynechococcus elongatus
ASVVPQERQQDTRKHYPNYKDIVLNDDFNTFRHVAACLMKYIPNKTSDRAWELTNQVHYEGQAIVWVGHKNKMNYTTNNC

SEQ ID NO: 3519 - protein, 95 aa, Thermosynechococcus elongatus
ASVVPQERQQDTRKHYPNYKDIVLNDDFNTFRHVAACLMKYIPNMTSDRAWELTNQVLYEGQAIVWVGPQVQAELYHEQLLRAGLTLAPLEPGGS

SEQ ID NO: 3520 - protein, 95 aa, Thermosynechococcus elongatus
ASVVPQERQQDTRKHYPNYKDIVLNDDFNTFRHDAACLMKYIPNKTSDRAWELTNQVHYEGQAIVWVGPQEQAELYHEQLLRAGLTMAPLEPEGS

SEQ ID NO: 3521 - protein, 95 aa, Thermosynechococcus elongatus
ASVVPQERQQDTRKHYPNYKDIVLNDDFNTFRHDAACLMKYIPNMTSDRAWELTNQVHYEGQAIVWVGPQVQAELYHEQLLRAGLNMAPLEPGGS

SEQ ID NO: 3522 - protein, 95 aa, Thermosynechococcus elongatus
ASVVPQERQQDTRKHYPNYKDIVLNDDFNTFRHVPACLMKYIPNKTSDRAWELTNQVHYECQAIVWVGPQEQAELYHEQLLRAGLTMAQLEPEGS

SEQ ID NO: 3523 - protein, 95 aa, Thermosynechococcus elongatus
ASVVPQERQQDTRKHYPNYKDIVLNDDFNTFRHVDAWLMKYIPKMTSDRAWELTNQVHYEGQAIVWVGPQEQAELYHEQLLRAGLTMAPLEPEGS

SEQ ID NO: 3524 - protein, 95 aa, Thermosynechococcus elongatus
ASVVPQERQQDTRKHYPNYKDIVLNDDFNTFRHVAASLMKYIPNKTSDRAWELTNQVHYEGQAIVWVGPQEQAELYHEQLLRAGLTMAPLEPEGS

SEQ ID NO: 3525 - protein, 36 aa, Thermosynechococcus elongatus
ASVVPQERQQDTRKHYPNYKDIVLNDDFNTFRHVAA

SEQ ID NO: 3526 - protein, 95 aa, Thermosynechococcus elongatus
ASVVPQERQQDTRKHYPNYKDIVLNDDFNTFRHVAACMMKYIPNMTSDRAWELTNQVHYEGQAIVWVGPQVQAELYHEQLLRAGLTMAPLEPGGS

SEQ ID NO: 3527 - protein, 58 aa, Thermosynechococcus elongatus
ASVVPQERQQDTRKHYPNYKDIVLNDDFNTFRHVAACLMKYIPNKTSDRAWELTNQVH

SEQ ID NO: 3528 - protein, 95 aa, Thermosynechococcus elongatus
ASVVPQERQQDTRKHYPNYKDIVLNDDFNTFRHVAACLMKYIPNKTSDRAWELTNQVHYEGQAIVWVGPQEQAELCHEQLLRAGLTMAPLEPEGS

SEQ ID NO: 3529 - protein, 95 aa, Thermosynechococcus elongatus
ASVVPQERQQDTRKHYPNYKDIVLNDDFNTFRHVAACLMKYIPNKTSDRAWELTNQVHYEGQAIVWVGPQEQAEFYHEQLLRAGLTLAPLDPEGS

SEQ ID NO: 3530 - protein, 95 aa, Thermosynechococcus elongatus
ASVVPQERQQDTRKHYPNYKDIVLNDDFNTFRHVAACLMKYIPNKTSDRAWELTNQVHYEGQAIVLVGPQEQAELYHEQLLRAGLTMAPLEPEGS

SEQ ID NO: 3531 - protein, 95 aa, Thermosynechococcus elongatus
ASVVPQERQQDTRKHYPNYKDIVLNDDFNTFRHVAACLMKYIPNKTSDRAWELTNQVHYEGQSIVWVAPQEQAELYHEQLLRAGLTMAPLEPEGS

SEQ ID NO: 3532 - protein, 95 aa, Thermosynechococcus elongatus
ASVVPQERQQDTRKHYPNYKDIVLNDDFNTFRHVAACLMKYIPNKTSDRAWELTNQVHYEGLAIVWVGPPEQAELYHELLLRAGLTMAPLEPEGS

SEQ ID NO: 3533 - protein, 95 aa, Thermosynechococcus elongatus
ASVVPQERQQDTRKHYPNYKDIVLNDDFNTFRHVAACLMKYIPNKTSDRAWELTNQVLYEGQAIVWVGPQEQAELYHEQLLRAGLTMAPLEPEGS

SEQ ID NO: 3534 - protein, 73 aa, Thermosynechococcus elongatus
ASVVPQERQQDTRKHYPNYKDIVLNDDFNTFRHVAACLMKYIPNMTSDRAWELTNQVQYEGLAIVWVGPQEQA

SEQ ID NO: 3535 - protein, 93 aa, Thermosynechococcus elongatus
ASVVPQERQQDTRKHYPNYKDIVLNDDFNTFRHVAACLMKYIPNMTSDRAWELTNQVHYEGQAIVWVGPQEQAELYHEQLLRAGLTMAPLEPE

SEQ ID NO: 3536 - protein, 95 aa, Thermosynechococcus elongatus
ASVVPQERQQDTRKHYPNYKDIVLNDDFNTFRHVAACLMKYIPNMTSDRAWELTNQVHYEGQAIVWVGPQEQAELYHEHLLRAGLTMAPLEPEGS

SEQ ID NO: 3537 - protein, 95 aa, Thermosynechococcus elongatus
ASVVPQERQQDTRKHYPNYKDIVLNDDFNTFRHVAACLMKYIPNMTSDRAWELTNQVHYEGLAIVWVGPQVQAELYHEQLLRAGLTMAPLEPGGS

SEQ ID NO: 3538 - protein, 75 aa, Thermosynechococcus elongatus
ASVVPQERQQDTRKHYPNYKDIVLNDDFNTFRHVAACLMKYIPNMTSDRAWELTNQVHYEGLAIVWVGPLEQAEL

SEQ ID NO: 3539 - protein, 95 aa, Thermosynechococcus elongatus
ASVVPQERQQDTRKHYPNYKDIVLNDDFNTFRHVAACLMKYIPNMTSDRAWELTNQVHYGGRAIVWVGPQEQAELYHELLLRAGLTMAPLEPEGS

SEQ ID NO: 3540 - protein, 58 aa, Thermosynechococcus elongatus
ASVVPQERQQDTRKHYPNYKDIVLNDDFNTFRHVAACLMKYIPNMTSDRACELTNQVH

SEQ ID NO: 3541 - protein, 95 aa, Thermosynechococcus elongatus
ASVVPQERQQDTRKHYPNYKDIVLNDDFNTFRHVAACLMKYIPNMTSDRAWELTNQVHYEGQAIVWVGPQEQAELYHEQLVRAGLTMATLEPEGS

SEQ ID NO: 3542 - protein, 95 aa, Thermosynechococcus elongatus
ASVVPQERQQDTRKHYPNYKDIVLNDDFNTFRHVAACLMKYISNMTSDRAWELTNQVHYEGQAIVWVGPQVQAELYHEQLLRAGLTMAPLEPGGS

SEQ ID NO: 3543 - protein, 95 aa, Thermosynechococcus elongatus
ASVVPQERQQDTRKHYPNYKDLVLNDDFNTFRHVAACFMKYIPNKTSDRARDLTNQVHYEGQAIVWVGPQEQAELYHEQLLRAGLTMAPLEPEGS

SEQ ID NO: 3544 - protein, 95 aa, Thermosynechococcus elongatus
ASVVPQERQQDTRKHYPNYKAIVLNDDFNTFRHYAACLMKYIPNMTSDRACELTNQVLYEGLAIVWVGPQEQAELYHEQLLRAGLTMAPLEPEGS

SEQ ID NO: 3545 - protein, 95 aa, Thermosynechococcus elongatus
ASVVPQERQQDTRKHYPNYKGRVLNDDFNTFRHVATCLKKYIPNMISDRAWELTNQVHYGGRAIVWVGPQEQAELYHEQLLRAGLTMAPLEPEGS

SEQ ID NO: 3546 - protein, 81 aa, Thermosynechococcus elongatus
ASVVPQERQQDTRKHYPNYKGIVLNDDFNTIRHVAACLMKYIPNMTSDRAWELTNHVHYDCHGIVWVGAHDQADLYLDQLW

SEQ ID NO: 3547 - protein, 95 aa, Thermosynechococcus elongatus
ASVVPQERQQDTRKHYPNYKGIVLNDDFNTVRHGAACVMKYIPNMTSDRAWEVTNQVHYEGQAIVWVGPQEQAELYHEQLLRAGLTMAPLEPEGS

SEQ ID NO: 3548 - protein, 95 aa, Thermosynechococcus elongatus
ASVVPQERQQDTRKHYPNYKGIVLNDDFNTFQHVVACLKKYIPNVISDRAWELTNQVHYGGRAIVWVGPQEQAELYHEQLLRAGLTMAPLEPEGS

SEQ ID NO: 3549 - protein, 95 aa, Thermosynechococcus elongatus
ASVVPQERQQDTRKHYPNYKGIVLNDDFNTFRHGAACLMKYIPNMTSDRAWELTNQVHYEGQAIVWVGPQEQAELYHEQLLRAGLTMAPLEPEGS

SEQ ID NO: 3550 - protein, 95 aa, Thermosynechococcus elongatus; identical to SEQ ID NO: 546

SEQ ID NO: 3551 - protein, 95 aa, Thermosynechococcus elongatus
ASVVPQERQQDTRKHYPNYKGIVLNDDFNTFRHVAACLMKYIPNKTSDRAWELTNQVHYEGQAIVWVGPQEQAELYHEQLLRAGLTMAPLEPGGS

SEQ ID NO: 3552 - protein, 95 aa, Thermosynechococcus elongatus
ASVVPQERQQDTRKHYPNYKGIVLNDDFNTFRHVAACLMKYIPNMTSDRAGELTNQVHYEGQAIVWVGPQEQAELYHEQLLRAGLTMAPLEPEGS

SEQ ID NO: 3553 - protein, 95 aa, Thermosynechococcus elongatus
ASVVPQERQQDTRKHYPNYKGIVLNDDFNTFRHVAACLMKYIPNMTSDRAWELTNQVHYEGQAIVWVGPQEQAELNHEHLLRAGLTMAPLEPEGS

SEQ ID NO: 3554 - protein, 95 aa, Thermosynechococcus elongatus
ASVVPQERQQDTRKHYPNYKGIVLNDDFNTFRHVAACLMKYIPNMTSDRAWELTNQVHYEGQAIVWVGPQEQAELYHEQLLRAGLTMAPLEPGGS

SEQ ID NO: 3555 - protein, 95 aa, Thermosynechococcus elongatus
ASVVPQERQQDTRKHYPNYKGIVLNDDFNTFRHVAACLMKYIPNMTSDRAWELTNQVHYEGLAIVWVGPQEQAELYHEQLLRAGLTMAPLEPEGS

SEQ ID NO: 3556 - protein, 95 aa, Thermosynechococcus elongatus
ASVVPQERQQDTRKHYPNYKGIVLNDDFNTFRHVAACLMKYIPNMISDRAWELTNQVHYLGLAIVLVGPQEQAELYHEQLLRAGLTMAPLEPEGS

SEQ ID NO: 3557 - protein, 95 aa, Thermosynechococcus elongatus
ASVVPQERQQDTRKHYPNYKGIVLNDDFNTFRHVAACLMKYIPNMTSDRAWELTNQVHYKGQAIVWVGPQEQAELNHEQLLRAGLTMAPLEPEGS

SEQ ID NO: 3558 - protein, 77 aa, Thermosynechococcus elongatus
ASVVPQERQQDTRKHYPNYKGIVLNDDFNTFRHVAACLMKYIPNMTSDRAWELTNQVHYKGQAIVWVCPQEQAELNH

SEQ ID NO: 3559 - protein, 95 aa, Thermosynechococcus elongatus
ASVVPQERQQDTRKHYPNYKGIVLNDDFNTFRHVAACLMKYIPHMTSDRAWEWTNQVHYEGQAIVWVGPQAQAELYPEHLLRAGLTMAPLEPGGS

SEQ ID NO: 3560 - protein, 40 aa, Thermosynechococcus elongatus
ASVVPQERQQDTRKHYPNYKGIVLNYDFNTFQHVVACLKK

SEQ ID NO: 3561 - protein, 95 aa, Thermosynechococcus elongatus
ASVVPQERQQDTRKHYPNYKGLVLNDDFNTFRHVAACLMKYIPTMTSDRAWELTNQVHYEGQAIVWVGPQEQAELYHEQLLRAGLTMAPLEPEGS

SEQ ID NO: 3562 - protein, 46 aa, Thermosynechococcus elongatus
ASVVPQERQQDTRKHYPNYKVSFERRLQHFPTRCCMLDEVHPKHDF

SEQ ID NO: 3563 - protein, 95 aa, Thermosynechococcus elongatus
ASVVPQERQQDTRKHYPNYKVIDLNDDFNTFRHDAACLMKYIPNKTSDRAWELTNQVHYEGQAIVWVGPQEQAELYHEQLLRAGLTMAPLEPEGS

SEQ ID NO: 3564 - protein, 52 aa, Thermosynechococcus elongatus
ASVVPQERQQDTRKHYPNYKVIVLNDDFNTIRHVAACLMKYIPNMTSDRAWE

SEQ ID NO: 3565 - protein, 95 aa, Thermosynechococcus elongatus
ASVVPQERQQDTRKHYPNYKVIVLNDDFNTFRHEAACLMKYIPNMTSDRAWELTNQVHYEGQAIVWVGPQEQAELYHEQLLRAGLTMAPLEPEGS

SEQ ID NO: 3566 - protein, 95 aa, Thermosynechococcus elongatus
ASVVPQERQQDTRKHYPNYKVIVLNDDFNTFRHVAACLMKYIPNMTSDRAWELTNQVHYECQAIVWVGPQEQAELYHEQVLRAGLTMAPLEPEGS

SEQ ID NO: 3567 - protein, 95 aa, Thermosynechococcus elongatus; identical to SEQ ID NO: 318

SEQ ID NO: 3568 - protein, 95 aa, Thermosynechococcus elongatus
ASVVPQERQQDTRKHYPNYKVIFLNDDFNTFQHVVACLKKYIPNMISDRAWELTNQVHYGGRAIVWVGPQEQAELYHEQLLRAGLTVAPLDPEGS

SEQ ID NO: 3569 - protein, 95 aa, Thermosynechococcus elongatus
ASVVPQERQQDTRKHYPNYKVIVLNDDFNTFQHVVACLKKYIPNMISDRAWELTNQVHYGGRAIVWVGPQEQAELYHEQFLRAGLTMAPLEPEGS

SEQ ID NO: 3570 - protein, 95 aa, Thermosynechococcus elongatus
ASVVPQERQQDTRKHYPNYKVIVLNDDFNTFRHVAACLMKYIPNMTSDRAWELTNQVHYEGQAIVWVGPKVQAELYHEQLLRAGLTMAPLEPGGS

SEQ ID NO: 3571 - protein, 95 aa, Thermosynechococcus elongatus; identical to SEQ ID NO: 12

SEQ ID NO: 3572 - protein, 95 aa, Thermosynechococcus elongatus
ASVVPQERQQDTRKHYPNYKVIVLNDDFNTFQHFVACLKKYIPNMISDRAWELTNQVHYGGRAIVWVGPQEQAELYHEQLLRAGLTMAPLEPEGS

SEQ ID NO: 3573 - protein, 95 aa, Thermosynechococcus elongatus; identical to SEQ ID NO: 44

SEQ ID NO: 3574 - protein, 95 aa, Thermosynechococcus elongatus; identical to SEQ ID NO: 1473

SEQ ID NO: 3575 - protein, 95 aa, Thermosynechococcus elongatus; identical to SEQ ID NO: 234

SEQ ID NO: 3576 - protein, 95 aa, Thermosynechococcus elongatus
ASVVPQERQQDTRKHYPNYKVIVLNDDFNTFRHVAACLMKYIPNMTSDRAWELTNQGHDEGQAIVWVGPQEQAELYHEHLLRAGLTMAPLEPEGS

SEQ ID NO: 3577 - protein, 95 aa, Thermosynechococcus elongatus; identical to SEQ ID NO: 64

SEQ ID NO: 3578 - protein, 95 aa, Thermosynechococcus elongatus; identical to SEQ ID NO: 2

SEQ ID NO: 3579 - protein, 95 aa, Thermosynechococcus elongatus; identical to SEQ ID NO: 18

SEQ ID NO: 3580 - protein, 95 aa, Thermosynechococcus elongatus
ASVVPQERQQDTRKHYPNYKVIVLTDDFNTFRHVAACLMKYIPNMTSDRAWELTNQVHYEGQAIVWVGPQEQAELYHEQLLRAGLTMAPLEPEGS

SEQ ID NO: 3581 - protein, 21 aa, Thermosynechococcus elongatus
ASVVPQERQQDTRKHYPNYKV

SEQ ID NO: 3582 - protein, 95 aa, Thermosynechococcus elongatus
ASVVPQERQQDTRKHYPNYKVKVLNDDFNTFRHVAACLMKYIPNKTSDRAWELTNQVHYEGQAIVWVGPQEQAELYHEQLLRAGLTMAPLEPEGS

SEQ ID NO: 3583 - protein, 95 aa, Thermosynechococcus elongatus
ASVVPQERQQDTRKHYPNYKVTVLNDDFNTFQHVVACLKKYIPNMISDRAWELTNQVHYGGRAIVWVGPQEQAELYHEQLLRAGLTMAPLEPEGS

SEQ ID NO: 3584 - protein, 95 aa, Thermosynechococcus elongatus
ASVVPQERQQDTRKHYPNYKVTVLNDDFNTFRHVAACLMKYIPNKTSDRAWELTNQVHYKGQAIVWVGPQEQAELNHEQLLRAGLTMAPLEPEGS

SEQ ID NO: 3585 - protein, 95 aa, Thermosynechococcus elongatus
ASVVPQERQQDTRKHYPNYKVTVLNDDFNTFRHVAACLMKYIPNKTSDRAWELTNQVHYEGQAIVWVGPQVQAELYHEQLLRAGLTMAPLEPEGS

SEQ ID NO: 3586 - protein, 95 aa, Thermosynechococcus elongatus
ASVVPQERQQDTRKHYPNYKVTVLNDDFNTFRHVAACLMKYIPNMTSDRAWELTNQVHYEGQAIVWVGPQEQAELYHEQLLRAGLTMAPLEPEGS

SEQ ID NO: 3587 - protein, 95 aa, Thermosynechococcus elongatus
ASVVPQERQQDTRKHYPNYKVRVLNDDFNTFQHVVACLKKYIPNMISDRAWELTNQVHYRGRAIVWVGPQEQAELYHEQLLRAGLTMAPLEPEGS

SEQ ID NO: 3588 - protein, 95 aa, Thermosynechococcus elongatus
ASVVPQERQQDTRKHYPNYKVRVLNDDFNTFQHVVACLKKYIPNMISDRAWELTNQVHYGGRAIVWVGPQEQAELYHEQLLRAGLTMAPLEPEGS

SEQ ID NO: 3589 - protein, 95 aa, Thermosynechococcus elongatus; identical to SEQ ID NO: 920

SEQ ID NO: 3590 - protein, 95 aa, Thermosynechococcus elongatus
ASVVPQERQQDTRKHYPNYKVRVLNDDFNTFRHVAACLMKYIPNMTSDRAWELTNQVHYEGQAIVWVGPQEQAELYHEHLLRAGLTMAPLEPEGS

SEQ ID NO: 3591 - protein, 95 aa, Thermosynechococcus elongatus
ASVVPQERQQDTRKHYPNYKVRVLNDDFNTFRHVAACLMKYIPNMTSDRAWELTNQVHYEGRAIVWVGPQEQAELYHEQLLRAGLTMAPLEPEGS

SEQ ID NO: 3592 - protein, 95 aa, Thermosynechococcus elongatus
ASVVPQERQQDTRKHYPNYKVRVLNDDFNTFRHVAACLMKYIPNMTSDRAWELTNQVHYKGQAIVWVGPQEQAELNHEQLLRAGLTMAPLEPEGS

SEQ ID NO: 3593 - protein, 95 aa, Thermosynechococcus elongatus
ASVVPQERQQDTRKHYPNYKVRVLNDDFNTFRHVAACLMKYIPNMTSDRAWELTIQVHYKGQAIVWVGPQEQAELYHEQLLRAGLTMAPLEPEGS

SEQ ID NO: 3594 - protein, 95 aa, Thermosynechococcus elongatus
ASVVPQERQQDTRKHYPNYKVIILNDDFNTIRHVAACLMKYIPNMTSDRAWELTNQVHYEGQAIVWVGPQVQAELYHEQLLRAGLTMAPLEPGGS

SEQ ID NO: 3595 - protein, 95 aa, Thermosynechococcus elongatus
ASVVPQERQQDTRKHYPNYKVIILNDDFNTFQHVTACLMKYIPNMTSDRAWELTNQVHYEGQAIVRVGPQEQAELYHKQLLRAGLTMAPLEPEGS

SEQ ID NO: 3596 - protein, 95 aa, Thermosynechococcus elongatus
ASVVPQERQQDTRKHYPNYKVIILNDDFNTFQHVATCLMKYIPNMTSDRAWELTNQVHYEGQAIVRVGPQEQAELYHKQLLRAGLTMAPLEPEGS

SEQ ID NO: 3597 - protein, 36 aa, Thermosynechococcus elongatus
ASVVPQERQQDTRKHYPNYKVIILNDDFNTFQHVAA

SEQ ID NO: 3598 - protein, 36 aa, Thermosynechococcus elongatus; identical to SEQ ID NO: 3597

SEQ ID NO: 3599 - protein, 95 aa, Thermosynechococcus elongatus; identical to SEQ ID NO: 24

SEQ ID NO: 3600 - protein, 95 aa, Thermosynechococcus elongatus; identical to SEQ ID NO: 687

SEQ ID NO: 3601 - protein, 95 aa, Thermosynechococcus elongatus
ASVVPQERQQDTRKHYPNYKVIILNDDFNTFQHVAACLKKYIPNMISDRAWELTNQVHYGGRAIVWVGPQVQAELYHEQLLRAGLTMAPLEPGGS

SEQ ID NO: 3602 - protein, 95 aa, Thermosynechococcus elongatus
ASVVPQERQQDTRKHYPNYKVIILNDDFNTFQHVAACLKKYIPNMISDRAWELTNQVHYGGRAIVWVCPQEQAELYHEQLLRAGLTMAPLEPEGS

SEQ ID NO: 3603 - protein, 95 aa, Thermosynechococcus elongatus
ASVVPQERQQDTRKHYPNYKVIILNDDFNTFQHVAACLMKYSPNMTSDRAWELTNQVHYEGQAIVRVGPQEQAELYHKQLLRAGLTMAPLEPEGS

SEQ ID NO: 3604 - protein, 95 aa, Thermosynechococcus elongatus; identical to SEQ ID NO: 170

SEQ ID NO: 3605 - protein, 95 aa, Thermosynechococcus elongatus
ASVVPQERQQDTRKHYPNYKVIILNDDFNTFQHVAACLMKYITNMTSDRAWELTNQVHYEGQAIVRVGPQEQAELNHEQLLRAGLTMAPLEPEGS

SEQ ID NO: 3606 - protein, 95 aa, Thermosynechococcus elongatus; identical to SEQ ID NO: 24

SEQ ID NO: 3607 - protein, 95 aa, Thermosynechococcus elongatus
ASVVPQERQQDTRKHYPNYKVIILNDDFNTFQHVAACLMKYIPNMTSDRAWELTNQGHYEGQAIVRVGPQEQAELYHKQLLRAGLTMAPLEPEGS

SEQ ID NO: 3608 - protein, 95 aa, Thermosynechococcus elongatus
ASVVPQERQQDTRKHYPNYKVIILNDDFNTFQHVAACLMKYIPNMTSDRAWELTNQVHYKGQAIVWVGPQVQAELYHEQLLRAGLTMAPLEPEGS

SEQ ID NO: 3609 - protein, 95 aa, Thermosynechococcus elongatus
ASVVPQERQQDTRKHYPNYKVIILNDDFNTFQHVAACLMKYIPNMTSDRAWELTNQVHYTGQAIVWVGPQEQAELNHEQLLRAGLTMAPLEPEGS

SEQ ID NO: 3610 - protein, 95 aa, Thermosynechococcus elongatus
ASVVPQERQQDTRKHYPNYKVIILNDDFNTFQHVAACLMKYIPNMTSDRAWELTNQVHYEGQAIVRVGPQEQAELYHKQLLRAGLTLAPLDPEGS

SEQ ID NO: 3611 - protein, 95 aa, Thermosynechococcus elongatus; identical to SEQ ID NO: 24

SEQ ID NO: 3612 - protein, 95 aa, Thermosynechococcus elongatus
ASVVPQERQQDTRKHYPNYKVIILNDDFNTFQHVAACLMKYIPNMTSDRAWELTNQVHYEGQAIVRDGPQEQAELYHKQLLRAGLTMAPLEPEGS

SEQ ID NO: 3613 - protein, 80 aa, Thermosynechococcus elongatus
ASVVPQERQQDTRKHYPNYKVIILNDDFNTFQHVAACLMKYIPNMTSDRAWELTNQVHYEGQAIVRVVHKNKLNYTTNNC

SEQ ID NO: 3614 - protein, 95 aa, Thermosynechococcus elongatus; identical to SEQ ID NO: 24

SEQ ID NO: 3615 - protein, 95 aa, Thermosynechococcus elongatus
ASVVPQERQQDTRKHYPNYKVIILNDDFNTFQHVAACLMKYIPNMTSDRAWELTNQVHYEGQAIVRVGPQEQAELYHKQMLRAGLTMAPLEPEGS

SEQ ID NO: 3616 - protein, 80 aa, Thermosynechococcus elongatus
ASVVPQERQQDTRKHYPNYKVIILNDDFNTFQHVAACLMKYIPNMTSDRAWELTNQVHYEGQAIVRVGPQEQAELYHKQL

SEQ ID NO: 3617 - protein, 95 aa, Thermosynechococcus elongatus
ASVVPQERQQDTRKHYPNYKVIILNDDFNTFQHVAACLMKYIPNMTSDRAWELTNQVHYEGQAIVRVGPQEQAELYHKQLLRAGLTMATLEPEGS

SEQ ID NO: 3618 - protein, 95 aa, Thermosynechococcus elongatus
ASVVPQERQQDTRKHYPNYKVIILNDDFNTFQHVAACLMKYIPNMTSDRAWELTNQVHYEGQAIVRVGPQEQAELYHKQLLRAGLTMAPLEPVGS

SEQ ID NO: 3619 - protein, 95 aa, Thermosynechococcus elongatus
ASVVPQERQQDTRKHYPNYKVIILNDDFNTFQHVAACLMKYIPNMTSDRAWELTNQVHYEGQAIVRVGPQEQAELYHKQLLRAGLTLAPLEQEGS

SEQ ID NO: 3620 - protein, 95 aa, Thermosynechococcus elongatus
ASVVPQERQQDTRKHYPNYKVIILNDDFNTFQHVAACLMKYIPNMTSDRAWELTNQVHYEGQAIVRVGPQEQAELYHKQLLRACLTMAPLEPEGS

SEQ ID NO: 3621 - protein, 95 aa, Thermosynechococcus elongatus
ASVVPQERQQDTRKHYPNYKVIILNDDFNTFQHVAACLMKYIPNMTSDRAWELTNQVHYEGQAIVRVGPQEQAELYHKHLLRAGLTMAPLEPEGS

SEQ ID NO: 3622 - protein, 95 aa, Thermosynechococcus elongatus
ASVVPQERQQDTRKHYPNYKVIILNDDFNTFQHVAACLMKYIPNMTSDRAWELTNQVHYEGQAIVRVGPQEQAELYHEQLLRTGLTMAPLEPEGS

SEQ ID NO: 3623 - protein, 95 aa, Thermosynechococcus elongatus; identical to SEQ ID NO: 170

SEQ ID NO: 3624 - protein, 95 aa, Thermosynechococcus elongatus
ASVVPQERQQDTRKHYPNYKVIILNDDFNTFQHVAACLMKYIPNMTSDRAWELTNQVHYEGQAIVRVVPQEQAELYHKQLLRAGLTMAPLEPEGS

SEQ ID NO: 3625 - protein, 95 aa, Thermosynechococcus elongatus
ASVVPQERQQDTRKHYPNYKVIILNDDFNTFQHVAACLMKYIPNMTSDRAWELTNQVHYEGQAIVLVGPQEQAELYHKQLLRAGLTMAPLEPEGS

SEQ ID NO: 3626 - protein, 95 aa, Thermosynechococcus elongatus; identical to SEQ ID NO: 111

SEQ ID NO: 3627 - protein, 95 aa, Thermosynechococcus elongatus; identical to SEQ ID NO: 111

SEQ ID NO: 3628 - protein, 95 aa, Thermosynechococcus elongatus; identical to SEQ ID NO: 111

SEQ ID NO: 3629 - protein, 95 aa, Thermosynechococcus elongatus
ASVVPQERQQDTRKHYPNYKVIILNDDFNTFQHVAACLMKYIPNMTSDRAWELTNQVHYEGQAIVWVGPQEQAVLYHELLLRAGLTMAPLEPEGS

SEQ ID NO: 3630 - protein, 95 aa, Thermosynechococcus elongatus
ASVVPQERQQDTRKHYPNYKVIILNDDFNTFQHVAACLMKYIPNMTSDRAWELTNQVHYEGQAIVWVGPQEHAELYHEQLLRAGLTMAPLEPEGS

SEQ ID NO: 3631 - protein, 95 aa, Thermosynechococcus elongatus
ASVVPQERQQDTRKHYPNYKVIILNDDFNTFQHVAACLMKYIPNMTSDRAWELTNQVHYEGQAIVWVGPQVQAELYHEQVLRAGLTMAPLEPGGS

SEQ ID NO: 3632 - protein, 95 aa, Thermosynechococcus elongatus
ASVVPQERQQDTRKHYPNYKVIILNDDFNTFQHVAACLMKYIPNMTSDRAWELTNQVHYEGRAIVWVGPQEQAELYHEQLLRAGLTMATLEPEGS

SEQ ID NO: 3633 - protein, 95 aa, Thermosynechococcus elongatus
ASVVPQERQQDTRKHYPNYKVIILNDDFNTFQHVAACLMKYIPNMTSDRAWELTNQVHYEGRAIVWVGPQEQAELYHEQLLRAGLTMAPLEPGGS

SEQ ID NO: 3634 - protein, 95 aa, Thermosynechococcus elongatus
ASVVPQERQQDTRKHYPNYKVIILNDDFNTFQHVAACLMKYIPNMTSDRAWELTNQVHYEGLAIVRVGPQEQAELYHKQLLRAGLTMAPLEPEGS

SEQ ID NO: 3635 - protein, 95 aa, Thermosynechococcus elongatus
ASVVPQERQQDTRKHYPNYKVIILNDDFNTFQHVAACLMKYIPNMTSDRAWELTNQVHYECQAIVRVGPQEQAELYHKQLLRAGLTMAPLEPEGS

SEQ ID NO: 3636 - protein, 95 aa, Thermosynechococcus elongatus
ASVVPQERQQDTRKHYPNYKVIILNDDFNTFQHVAACLMKYIPNMTSDRAWELTNQVHYDGQAIVRVGPQEQAELYHKQLLRAGLTMAPLEPEGS

SEQ ID NO: 3637 - protein, 95 aa, Thermosynechococcus elongatus
ASVVPQERQQDTRKHYPNYKVIILNDDFNTFQHVAACLMKYIPNMTSDRAWELTNQVHYGGRANVWVGPQEQAELYHEQLLRAGLTMAPLEPEGS

SEQ ID NO: 3638 - protein, 95 aa, Thermosynechococcus elongatus; identical to SEQ ID NO: 233

SEQ ID NO: 3639 - protein, 95 aa, Thermosynechococcus elongatus
ASVVPQERQQDTRKHYPNYKVIILNDDFNTFQHVAACLMKYIPNMTSDRAWELTNQVHYVGQAIVWVGPQEQAELYNEQLLRAGLTMAPLEPKGS

SEQ ID NO: 3640 - protein, 95 aa, Thermosynechococcus elongatus
ASVVPQERQQDTRKHYPNYKVIILNDDFNTFQHVAACLMKYIPNMTSDRAWELTNQVHYVGQAIVWVGPQERAELYHEQLLRAGLTMAPLEPGGS

SEQ ID NO: 3641 - protein, 59 aa, Thermosynechococcus elongatus
ASVVPQERQQDTRKHYPNYKVIILNDDFNTFQHVAACLMKYIPNMTSDRAWELTNQVHY

SEQ ID NO: 3642 - protein, 93 aa, Thermosynechococcus elongatus
ASVVPQERQQDTRKHYPNYKVIILNDDFNTFQHVAACLMKYIPNMTSDRAWELTNQVHFEGLAIVRVGPQELAVLLHKLLLRAGLYMATLESE

SEQ ID NO: 3643 - protein, 95 aa, Thermosynechococcus elongatus; identical to SEQ ID NO: 24

SEQ ID NO: 3644 - protein, 95 aa, Thermosynechococcus elongatus
ASVVPQERQQDTRKHYPNYKVIILNDDFNTFQHVAACLMKYIPNMTSDIAWELTNQVHYEGQAIVWVGPQEQAELYHEQLLRAGLTMAPLEPEGS

SEQ ID NO: 3645 - protein, 95 aa, Thermosynechococcus elongatus
ASVVPQERQQDTRKHYPNYKVIILNDDFNTFQHVAACLMKYIPNMTSERAWELTNQVHYEGQAIVWVGPQEQAELYHEQLLRAGLTMAPLEPEGS

SEQ ID NO: 3646 - protein, 95 aa, Thermosynechococcus elongatus; identical to SEQ ID NO: 170

SEQ ID NO: 3647 - protein, 95 aa, Thermosynechococcus elongatus
ASVVPQERQQDTRKHYPNYKVIILNDDFNTFQHVAACLMKYVPNMTSDRAWELTNQVHYEGQAIVRVGPQEQAELYHEQLLRAGLTMAPLEPEGS

SEQ ID NO: 3648 - protein, 95 aa, Thermosynechococcus elongatus
ASVVPQERQQDTRKHYPNYKVIILNDDFNTFQHVAACLMEYIPNMTSDRAWELTNQVHYEGQAIVRVGPQEQAELYHKQLLRAGLTMAPLEPEGS

SEQ ID NO: 3649 - protein, 95 aa, Thermosynechococcus elongatus
ASVVPQERQQDTRKHYPNYKVIILNDDFNTFQHVAACFMKYIPNMTSDRAWELTNQVHYEGQAIVRVGPQEQAELYHKQLLRAGLTMAPLEPEGS

SEQ ID NO: 3650 - protein, 95 aa, Thermosynechococcus elongatus
ASVVPQERQQDTRKHYPNYKVIILNDDFNTFQHVAACLMKYIPNMTSDRAWELTNQVHYVGQAIVWVGTQEQAELYHEQLLRAGLTMAPLEPEGS

SEQ ID NO: 3651 - protein, 95 aa, Thermosynechococcus elongatus
ASVVPQERQQDTRKHYPNYKVIILNDDFNTFQHVVACLKKYIPNMISDRAWELTNQVHYKGQAIVWVGPQEQAELYHEQLLRAGLTMAPLEPEGS

SEQ ID NO: 3652 - protein, 95 aa, Thermosynechococcus elongatus; identical to SEQ ID NO: 313

SEQ ID NO: 3653 - protein, 36 aa, Thermosynechococcus elongatus
ASVVPQERQQDTRKHYPNYKVIILNDDFNTFQHFAA

SEQ ID NO: 3654 - protein, 95 aa, Thermosynechococcus elongatus
ASVVPQERQQDTRKHYPNYKVIILNDDFNTFQHFAACLMKYIPNMTSDRAWELTNQFHYVGQAIVWVGPQEQAELYLEQFLRAGLTMAPLEPGGS

SEQ ID NO: 3655 - protein, 95 aa, Thermosynechococcus elongatus
ASVVPQERQQDTRKHYPNYKVIILNDDFNTFQRVAACLMKYIPNMTSDRAWELTNQVHYEGQAIVRVGPQEQAELYHKQLLRAGLTMAPLEPGGS

SEQ ID NO: 3656 - protein, 95 aa, Thermosynechococcus elongatus
ASVVPQERQQDTRKHYPNYKVIILNDDFNTFQYVAACLMKYIPNMTSDRAWELTNQVHYEGQAIVRVGPQEQAELYHKQLLRAGLTMAPLEPEGS

SEQ ID NO: 3657 - protein, 95 aa, Thermosynechococcus elongatus
ASVVPQERQQDTRKHYPNYKVIILNDDFNTFRHVAACLMKYIPNKTSDRAWELTNQVHYEGQAIVWVGPQVQAELYHEQLLRAGLTMAPLEPGGS

SEQ ID NO: 3658 - protein, 95 aa, Thermosynechococcus elongatus
ASVVPQERQQDTRKHYPNYKVIILNDDFNTFRHVAACLMKYIPNMTSDRAWELTNQVHYEGQAIVWVGPQVQAELYHEQLLRAGLTRAPLEPGGS

SEQ ID NO: 3659 - protein, 95 aa, Thermosynechococcus elongatus
ASVVPQERQQDTRKHYPNYKVIILNDDFNTFRHVAACLMKYIPNMTSDRAWELTNQVHYEGQAIVWVGPQVQAELYHEQLLRAGLTMAPLEPEGS

SEQ ID NO: 3660 - protein, 95 aa, Thermosynechococcus elongatus; identical to SEQ ID NO: 3659

SEQ ID NO: 3661 - protein, 95 aa, Thermosynechococcus elongatus
ASVVPQERQQDTRKHYPNYKVIILNDDFNTFRHVAACLMKYIPNMTSDRAWELTNQVHYGGRAIVWVGPQEQAELYHEQLLRAGLTMAPLEPEGS

SEQ ID NO: 3662 - protein, 95 aa, Thermosynechococcus elongatus; identical to SEQ ID NO: 289

SEQ ID NO: 3663 - protein, 95 aa, Thermosynechococcus elongatus
ASVVPQERQQDTRKHYPNYKVIILNDDFNTFRHVVACLKKYIPNMISDRAWELTNQVHYGGRAIVWVGPQEQAELYHEQLLRAGLTMAPLEPEGS

SEQ ID NO: 3664 - protein, 95 aa, Thermosynechococcus elongatus
ASVVPQERQQDTRKHYPNYKVIILNDDFNTFLHVAACLMKYIPNMTSDRAWELTNQVHYEGQAIVWVGPQEQAELYHEQLLRAGLTMALLEPEGS

SEQ ID NO: 3665 - protein, 31 aa, Thermosynechococcus elongatus
ASVVPQERQQDTRKHYPNYKVIILNDDFNTF

SEQ ID NO: 3666 - protein, 95 aa, Thermosynechococcus elongatus
ASVVPQERQQDTRKHYPNYKVIILNDDFSTFQHVAACLMKYIPNMTSDRAWELTNQVHYGGRAIVWVGPQEQAELYHEQLLRAGLTMAPLEPEGS

SEQ ID NO: 3667 - protein, 95 aa, Thermosynechococcus elongatus
ASVVPQERQQDTRKHYPNYKVIILNDVFNTFQHVAACLMKYIPNKTSDRARELTNQVHYEGQAIVWVGPQEQAELYHEQLLRAGLTMAPLEPEGS

SEQ ID NO: 3668 - protein, 95 aa, Thermosynechococcus elongatus
ASVVPQERQQDTRKHYPNYKVIILNDYFNTFQHVAACLMKYIPNMTSDRAWELTNQVHYEGQAIVRVGPQEQAELYHKQLLRAGLTMAPLEPGGS

SEQ ID NO: 3669 - protein, 95 aa, Thermosynechococcus elongatus
ASVVPQERQQDTRKHYPNYKVIILNDYFNTFQHVAACLMKYIPNMTSDRAWELTNQVHYEGQAIVRVGPQEQAELYHEQLLRAGLTMAPLEPGGS

SEQ ID NO: 3670 - protein, 95 aa, Thermosynechococcus elongatus
ASVVPQERQQDTRKHYPNYKVIILNDYFNTFQHVAACLMKYIPNMTSDRAWELTNQVHYEGQAIVWVGPQVQAELYHEQLLRAGLTMAPLVPGGS

SEQ ID NO: 3671 - protein, 95 aa, Thermosynechococcus elongatus
ASVVPQERQQDTRKHYPNYKVIILNDYFNTFRHVAACLMKYIPNMTSDRAWELTNQVHYEGQAIVWVGPQEQAELYHEQLLRAGLTMAPLEPEGS

SEQ ID NO: 3672 - protein, 95 aa, Thermosynechococcus elongatus
ASVVPQERQQDTRKHYPNYKVIILNVDFNTFQHVAACLMKYIPNMTSDRAWELTNQVHYEGQAIVRVGPQEQAELYHKQLLRAGLTMAPLEPEGS

SEQ ID NO: 3673 - protein, 95 aa, Thermosynechococcus elongatus
ASVVPQERQQDTRKHYPNYKVIILSDDFNTFQHVAACLMKYIPNMTSDRAWELTNQVHYEGQAIVRVGPQEQAELYHKQLLRAGLTMAPLEPEGS

SEQ ID NO: 3674 - protein, 58 aa, Thermosynechococcus elongatus
ASVVPQERQQDTRKHYPNYKVIELNDDFNTFRHVAAWLMKYIPNMTSDRAWELTNQVH

SEQ ID NO: 3675 - protein, 23 aa, Thermosynechococcus elongatus
ASVVPQERQQDTRKHYPNYKVID

SEQ ID NO: 3676 - protein, 95 aa, Thermosynechococcus elongatus
ASVVPQERQQDTRKHYPNYKVIDLNDDINTFRHVAPCLMKYIPNMTYDRDWDLTNQGHYAGQAIVWVGPQEQAELYHEHLLRAGLTMAPLEPEGS

SEQ ID NO: 3677 - protein, 95 aa, Thermosynechococcus elongatus
ASVVPQERQQDTRKHYPNYKVIDLNDDFNTFRHVAACLMKYIPNKTSDRAWELTNQVHYEGQAIVWVGPQEQAELYHEQLLRAGLTMAPLEPEGS

SEQ ID NO: 3678 - protein, 95 aa, Thermosynechococcus elongatus
ASVVPQERQQDTRKHYPNYKVIDLNDDFNTFRHVAACLMKYIPNKTSDRAWELTNQVHYEGQAIVWVGPQEQAVLYHEQLLRAGLTMAPLEPVGS

SEQ ID NO: 3679 - protein, 95 aa, Thermosynechococcus elongatus
ASVVPQERQQDTRKHYPNYKVIDLNDDFNTFRHVAACLMKYIPNMTSDRAWELTNQVHYEGQAIVWVGPQEQAELYHEQLLRAGLSMAPLEPEGS

SEQ ID NO: 3680 - protein, 75 aa, Thermosynechococcus elongatus
ASVVPQERQQDTRKHYPNYKVIDLNDYFNTIRHVAASLMKYIPKMTSDRAWELTNHVLFDGQAIVWVGPQELAEL

SEQ ID NO: 3681 - protein, 95 aa, Thermosynechococcus elongatus
ASVVPQERQQDTRKHYPNYKVIGLNDDFNTFRHVAACLKKYIPNMISDRAWELTNQVHYGGRAIVWVGPQEQAELYHEQLLRAGLTMAPLEPEGS

SEQ ID NO: 3682 - protein, 95 aa, Thermosynechococcus elongatus
ASVVPQERQQDTRKHYPNYKVIGLNDDFNTFRHVAACLMKYIPNKTSDRAWELTNQVHYEGQAIVWVGPQEQAELYHEQLLRAGLTMAPLEPEGS

SEQ ID NO: 3683 - protein, 95 aa, Thermosynechococcus elongatus; identical to SEQ ID NO: 3682

SEQ ID NO: 3684 - protein, 95 aa, Thermosynechococcus elongatus
ASVVPQERQQDTRKHYPNYKVIGLNDDFNTFRHVAACLMKYIPNKTSDRAWELTNQVHYEGQAIVWVGPQEQAELYHEQLLRAGLTMAPLEPGGS

SEQ ID NO: 3685 - protein, 95 aa, Thermosynechococcus elongatus
ASVVPQERQQDTRKHYPNYKVIGLNDDFNTFRHVAACLMKYIPNKTSDRAWELTNQVHYEGQAIVWVGPQVQAELYHEQLLRAGLTMAPLEPGGS

SEQ ID NO: 3686 - protein, 95 aa, Thermosynechococcus elongatus
ASVVPQERQQDTRKHYPNYKVIGLNDDFNTFRHVAACLMKYIPNMTSDRAWELTNQVHYEGQAIVWVGPQEQAELYHEQVLRAGLTMAPLEPEGS

SEQ ID NO: 3687 - protein, 95 aa, Thermosynechococcus elongatus
ASVVPQERQQDTRKHYPNYKVIGLNDDFNTFRHVAACLMKYIPNMTSDRAWELTNQVHYEGQAIVWVGPQEQSELYHEQLLRAGLTMAPLEPEGS

SEQ ID NO: 3688 - protein, 95 aa, Thermosynechococcus elongatus
ASVVPQERQQDTRKHYPNYKVIGLNDDFNTFRHVAACLMKYIPNMTSDRAWELTNQVHYEGQAIVWVGPQVQAELYHEQLLRAGLTIAPLEPGGS

SEQ ID NO: 3689 - protein, 95 aa, Thermosynechococcus elongatus
ASVVPQERQQDTRKHYPNYKVIGLNDDFNTFRHVAACLMKYIPNMTSDRAWELTNQVHYEGQAIVWVGPQVQAELYHEQLLRAGLTMAPLEPGGS

SEQ ID NO: 3690 - protein, 36 aa, Thermosynechococcus elongatus
ASVVPQERQQDTRKHYPNYKVIVLNDDFNTFQHVFE

SEQ ID NO: 3691 - protein, 95 aa, Thermosynechococcus elongatus; identical to SEQ ID NO: 395

SEQ ID NO: 3692 - protein, 36 aa, Thermosynechococcus elongatus; identical to SEQ ID NO: 556

SEQ ID NO: 3693 - protein, 95 aa, Thermosynechococcus elongatus; identical to SEQ ID NO: 4

SEQ ID NO: 3694 - protein, 95 aa, Thermosynechococcus elongatus; identical to SEQ ID NO: 16

SEQ ID NO: 3695 - protein, 95 aa, Thermosynechococcus elongatus
ASVVPQERQQDTRKHYPNYKVIVLNDDFNTFRHFAAFLMKYIPNMTSDRAWELTNQVHYEGQAIVWVGPQEQAELYHEQLLRAGLTLAPLEPEGS

SEQ ID NO: 3696 - protein, 95 aa, Thermosynechococcus elongatus; identical to SEQ ID NO: 7

SEQ ID NO: 3697 - protein, 52 aa, Thermosynechococcus elongatus
ASVVPQERQQDTRKHYPNYKVIVLNDDFNTIRHVAACLMKYIPNKTSDRAWE

SEQ ID NO: 3698 - protein, 95 aa, Thermosynechococcus elongatus; identical to SEQ ID NO: 197

SEQ ID NO: 3699 - protein, 95 aa, Thermosynechococcus elongatus; identical to SEQ ID NO: 12

SEQ ID NO: 3700 - protein, 95 aa, Thermosynechococcus elongatus
ASVVPQERQQDTRKHYPNYKVIVLNDDFNTFRHVAAGLMKYIPNMTSDRAWELTNQVHYEGQAIVWVGPQEQAELYHEQLLRAGLTMAPLEPEGS

SEQ ID NO: 3701 - protein, 95 aa, Thermosynechococcus elongatus
ASVVPQERQQDTRKHYPNYKVIVLNDDFNTFRHVAACLMKDIPNMTSDRAWELTNQVHYTGQAIVWVGPQEQAELNHEQLLRAGLTMATLEPEGS

SEQ ID NO: 3702 - protein, 95 aa, Thermosynechococcus elongatus
ASVVPQERQQDTRKHYPNYKVIVLNDDFNTFRHVAACLMKYIPNKTSDRAWELTKQVHYEGQAIVWVGPQEQAELYHEQLLRAGLTMAPLEPEGS

SEQ ID NO: 3703 - protein, 95 aa, Thermosynechococcus elongatus
ASVVPQERQQDTRKHYPNYKVIVLNDDFNTFRHVAACLMKYIPNKTSDRAWELTNQVHYGGRAIVWVGPQEQAELYHEHLLRAGLTRAPLEPEGS

SEQ ID NO: 3704 - protein, 95 aa, Thermosynechococcus elongatus
ASVVPQERQQDTRKHYPNYKVIVLNDDFNTFRHVAACLMKYIPNMTSDRAWELTNQVHYEGQAIVWVGPQVQAELYHEHLLRAGLTLAPLEPGGS

SEQ ID NO: 3705 - protein, 95 aa, Thermosynechococcus elongatus
ASVVPQERQQDTRKHYPNYKVIVLNDDFNTFRHVAACLMKYIPNMTSDRAWELTNQVHYEGQAIVWVGPQEQAELYHEQLLRAGLTRAPLDPEGS

SEQ ID NO: 3706 - protein, 95 aa, Thermosynechococcus elongatus; identical to SEQ ID NO: 16

SEQ ID NO: 3707 - protein, 95 aa, Thermosynechococcus elongatus
ASVVPQERQQDTRKHYPNYKVIVLNDDFNTFRHVAACLMKYLPNMTSDRAWELTNQVHYEGQAIVWVGPQEQAELYHEHLLRAGLTMAPLEPEGS

SEQ ID NO: 3708 - protein, 59 aa, Thermosynechococcus elongatus
ASVVPQERQQDTRKHYPNYKVIVKNDDFNTIQHVVACLMKYIPNMTSDRAWELTNHVHY

SEQ ID NO: 3709 - protein, 59 aa, Thermosynechococcus elongatus
ASVVPQERQQDTRKHYPNYKVIVMNDDFNTIRHDAACLMKYIPNKTSDRDWELTNQVLY

SEQ ID NO: 3710 - protein, 37 aa, Thermosynechococcus elongatus
ASVVPQERQQDTRKHYPNYKVIVMNDDFNTYRHDAAC

SEQ ID NO: 3711 - protein, 95 aa, Thermosynechococcus elongatus
ASVVPQERQQDTRKHYPNYKVIVMNDDFNTFRHVAACLMKYIPNMTSDRAWELTNHVHYEGQAIVWVGPQEQAELYHEQLLRAGLTIAPLEPEGS

SEQ ID NO: 3712 - protein, 95 aa, Thermosynechococcus elongatus; identical to SEQ ID NO: 2

SEQ ID NO: 3713 - protein, 55 aa, Thermosynechococcus elongatus; identical to SEQ ID NO: 1591

SEQ ID NO: 3714 - protein, 95 aa, Thermosynechococcus elongatus
ASVVPQERQQDTRKHYPNYKVIVVNDDVNTFRHVAACLMKYIPNKTSDRAWELTNQVHYEGQAIVWVGPQEQAELYHEQLLRAGLTMAPLEPEGS

SEQ ID NO: 3715 - protein, 95 aa, Thermosynechococcus elongatus
ASVVPQERQQDTRKHYPNYKVIVVNDDFNTFRHVAACLMKYIPNMTSDRAWELTNQVHYEGQAIVWVGPQEQAELYHEQLLRAGLTMAPLEPEGS

SEQ ID NO: 3716 - protein, 95 aa, Thermosynechococcus elongatus
  misc_feature (24)..(24): Xaa can be any naturally occurring amino acid
ASVVPQERQQDTRKHYPNYKVIVXNDDFNTFRHVAACLMKYIPNMTSDRAWELTNQVHYEGQAIVWVGPQEQAELYHEQLLRAGLTMAPLEPEGS

SEQ ID NO: 3717 - protein, 23 aa, Thermosynechococcus elongatus
ASVVPQERQQDTRKHYPNYKVIV

SEQ ID NO: 3718 - protein, 23 aa, Thermosynechococcus elongatus
ASVVPQERQQDTRKHYPNYKVIV

SEQ ID NO: 3719 - protein, 23 aa, Thermosynechococcus elongatus
ASVVPQERQQDTRKHYPNYKVIV

SEQ ID NO: 3720 - protein, 23 aa, Thermosynechococcus elongatus
ASVVPQERQQDTRKHYPNYKVIV

SEQ ID NO: 3721 - protein, 95 aa, Thermosynechococcus elongatus
ASVVPQERQQDTRKHYPNYKVIVSNDDFNTFRHVAACLMKYIPNKTSDRAWELTNQVHYEGQAIVWVGPQEQAELYHEQLLRAGLTMAPLEPEGS

SEQ ID NO: 3722 - protein, 95 aa, Thermosynechococcus elongatus
ASVVPQERQQDTRKHYPNYKVIVSNDDFNTFRHVAACLMKYIPNMTSDRAWELTNQVHYEGQAIVWVGPQEQAELYHEQVLRAGLTMAPLEPEGS

SEQ ID NO: 3723 - protein, 95 aa, Thermosynechococcus elongatus
ASVVPQERQQDTRKHYPNYKVIVSNDDFNTFRHVAACLMKYIPNMTSDRAWELTNQVHYEGQAIVWVGPQGQAELYHEQLLRAGLTMAPLEPEGS

SEQ ID NO: 3724 - protein, 95 aa, Thermosynechococcus elongatus
ASVVPQERQQDTRKHYPNYKVIVLNDDFNTFQHVAACLMKYIPNMTSDRAWELTNQVHYEGQTIVWVGPQEQAELYHEQLLRAGLTMAPLEPEGS

SEQ ID NO: 3725 - protein, 95 aa, Thermosynechococcus elongatus; identical to SEQ ID NO: 12

SEQ ID NO: 3726 - protein, 95 aa, Thermosynechococcus elongatus; identical to SEQ ID NO: 4

SEQ ID NO: 3727 - protein, 95 aa, Thermosynechococcus elongatus
ASVVPQERQQDTRKHYPNYKVIVFNDDFNTFRHVAACLMKYIPNMTSDRAWELTNQVHYEGQAIVWVGPQEQAELYHEQLLIAGLTMAPLEPEGS

SEQ ID NO: 3728 - protein, 95 aa, Thermosynechococcus elongatus
ASVVPQERQQDTRKHYPNYKVIVLKDDFNTYRHVAACLMKYIPNMTSDRAWDLTNQVHYEGQAIFWVGPQEQAELYHEQLLRAGLTMAPLEPGGS

SEQ ID NO: 3729 - protein, 95 aa, Thermosynechococcus elongatus
ASVVPQERQQDTRKHYPNYKVIVLKDDFNTFRHVAACLMKYIPNKTSDRAWELTNQVHYEGQAIVWVGPQEQAELYHEQLLRAGLTMAPLEPEGS

SEQ ID NO: 3730 - protein, 95 aa, Thermosynechococcus elongatus
ASVVPQERQQDTRKHYPNYKVIVLNNDFNTFRHVAACLMKYIPNMTSDRAWELTNQVHYEGQAIVWVGPQEQAELYHEQLLRAGLTMAPLEPEGS

SEQ ID NO: 3731 - protein, 95 aa, Thermosynechococcus elongatus
ASVVPQERQQDTRKHYPNYKVIVLNEDFNTFQHVVACLKKYIPNMISDRAWELTNQVHYGGRAIVWVGPQEQAELYHEQLLRAGLTMAPLEPEGS

SEQ ID NO: 3732 - protein, 95 aa, Thermosynechococcus elongatus
ASVVPQERQQDTRKHYPNYKVIVLNEDFNTFRHVAACLMKYIPNMTSDRAWELTNQVHYEGQAIVWVGPQEQAELNHEQLLRAGLTMAPLEPEGS

SEQ ID NO: 3733 - protein, 95 aa, Thermosynechococcus elongatus
ASVVPQERQQDTRKHYPNYKVIVLNEDFNTFRHVAACLMKYIPNMTSDRAWELTNQVHYEGQAIVWVGPQEQAELYHEQLLRAGLTMAPLEPEGS

SEQ ID NO: 3734 - protein, 95 aa, Thermosynechococcus elongatus
ASVVPQERQQDTRKHYPNYKVIVLNDEFNTFRHVAACLMKYIPNKTSDRAWELTNQVHYEGQAIVWVGPQEQAELNHEQLLRAGLTMAPLEPEGS

SEQ ID NO: 3735 - protein, 95 aa, Thermosynechococcus elongatus
ASVVPQERQQDTRKHYPNYKVIVLNDEFNTFRHVAACLMKYIPNMTSDRAWELTNQVHYEGQAIDWVGPQEQAELYHEQLLRAGLTMAPLEPEGS

SEQ ID NO: 3736 - protein, 95 aa, Thermosynechococcus elongatus
ASVVPQERQQDTRKHYPNYKVIVLNDDINTFRHVAACVMKYIPNMTSDRAWELTNQVHYEGQAIVWVGPQEQAELYHEQLLRAGLTMAPLEPEGS

SEQ ID NO: 3737 - protein, 95 aa, Thermosynechococcus elongatus
ASVVPQERQQDTRKHYPNYKVIVLNDDINTFRHVAACLMKYIPNMTSDRAWELTNQVHYGGRAIVWVGPQEQAELYHEHLLRAGLTLAPLEPEGS

SEQ ID NO: 3738 - protein, 95 aa, Thermosynechococcus elongatus
ASVVPQERQQDTRKHYPNYKVIVLNDDLNTFRHVAACLMKYIPNMTSDRAWELTNQVHYEGQAIVWVGPQEQAELNHEQLLRAGLTMAPLEPEGS

SEQ ID NO: 3739 - protein, 95 aa, Thermosynechococcus elongatus
ASVVPQERQQDTRKHYPNYKVIVLNDDLNTFRHVAACLMKYIPNMTSDRAWELTNQVHYEGQAIVWVGPQVQAELYHEQLLRAGLTMAPLEPEGS

SEQ ID NO: 3740 - protein, 95 aa, Thermosynechococcus elongatus
ASVVPQERQQDTRKHYPNYKVIVLNDDVNTFRHVAACLMKYIPNMTSDRAWELTNQVHYEGQAIVWVGPQEQAELYHEQLLRAGLTMAPLEPEGS

SEQ ID NO: 3741 - protein, 77 aa, Thermosynechococcus elongatus
ASVVPQERQQDTRKHYPNYKVIVLNDDVNTFRHVAACLMKYIPNLTSDRAWELTNQVHYEGQAIVWVCPQEQAELYH

SEQ ID NO: 3742 - protein, 95 aa, Thermosynechococcus elongatus
ASVVPQERQQDTRKHYPNYKVIVLNDDYNTIRHVAACMMKYIPNKTSDRAWELTNQVHYVGQAIVCVGPQEQAELYHEQLLRAGLTIAPLEPEGS

SEQ ID NO: 3743 - protein, 95 aa, Thermosynechococcus elongatus
ASVVPQERQQDTRKHYPNYKVIVLNDDYNTYRHDAACLMKYIPNMTSDRAWELTNQVLYEGQAIVWVGPQEQAELYHEQLLRAGLTMAPLEPEGS

SEQ ID NO: 3744 - protein, 95 aa, Thermosynechococcus elongatus
ASVVPQERQQDTRKHYPNYKVIVLNDDYNTFRHDAACLMKYIPNMTSDRACELTNQVLFEGLAIVWVGPQEQAELYHEQLLRAGLTMAPLEPVGS

SEQ ID NO: 3745 - protein, 95 aa, Thermosynechococcus elongatus
ASVVPQERQQDTRKHYPNYKVIVLNDDYNTFRHDAACLMKYIPNMTSDRAWELTNQVHYEGQAIVWVGPQEQAELYHEQLLRAGLTMAPLEPEGS

SEQ ID NO: 3746 - protein, 95 aa, Thermosynechococcus elongatus
ASVVPQERQQDTRKHYPNYKVIVLNDDYNTFRHVAACLMKYIPNMTSDRAWELTNQVHYEGQAIVWVGPQEQAELYHEQLWRAGLTIAPLEPEGS

SEQ ID NO: 3747 - protein, 52 aa, Thermosynechococcus elongatus
ASVVPQERQQDTRKHYPNYKVIVLNDDYNTFRHVAACLMKYIPNMTSDRAWE

SEQ ID NO: 3748 - protein, 95 aa, Thermosynechococcus elongatus
ASVVPQERQQDTRKHYPNYKVIVLNDDYNTFRHVAACLMKYIPNMTSDRAWELTNQVHYEGQAIVWVGPQVQAELYHEQLLRAGLTMAPLEPGGS

SEQ ID NO: 3749 - protein, 95 aa, Thermosynechococcus elongatus
ASVVPQERQQDTRKHYPNYKVIVLNDDYNTFRHFAACLMKYIPNMTSDRAWELTNQVHYEGQAIVWVGPQEQAELYHEQLLRAGLTMAPLEPEGS

SEQ ID NO: 3750 - protein, 95 aa, Thermosynechococcus elongatus
ASVVPQERQQDTRKHYPNYKVIVLNDDCNTCRHVAACLKKYIPHLTSDRAWELTNQGHYEGQAIVWVGPQEQAELYPEQLLRAGLTMAPLEPEGS

SEQ ID NO: 3751 - protein, 95 aa, Thermosynechococcus elongatus
ASVVPQERQQDTRKHYPNYKVIVLNDDLNTFRHVAACLMKYIPNMTSDRAWELTNQVHYEGQAIVWVGPQVQAELYHEQLLRAGLTMAPLEPGGS

SEQ ID NO: 3752 - protein, 95 aa, Thermosynechococcus elongatus
ASVVPQERQQDTRKHYPNYKVIVLNDDFKTFRHVAACLMKYIPNMTSDRAWELTNQVHYEGQAIVWVGPQEQAELYHEQLLRAGLTMAPLEPEGS

SEQ ID NO: 3753 - protein, 95 aa, Thermosynechococcus elongatus; identical to SEQ ID NO: 3752

SEQ ID NO: 3754 - protein, 95 aa, Thermosynechococcus elongatus; identical to SEQ ID NO: 7

SEQ ID NO: 3755 - protein, 95 aa, Thermosynechococcus elongatus; identical to SEQ ID NO: 2

SEQ ID NO: 3756 - protein, 51 aa, Thermosynechococcus elongatus
ASVVPQERQQDTRKHYPNYKVIVLNDDFNTIRHFAECLMKYIPNKTSDRAW

SEQ ID NO: 3757 - protein, 95 aa, Thermosynechococcus elongatus
ASVVPQERQQDTRKHYPNYKVIVLNDDFNTIQHDVACLKKYIPNMISDRAWELTNQVHYVGQAIVWVGPLVQAELFHEQLLRAGLTMAPLEPGGS

SEQ ID NO: 3758 - protein, 95 aa, Thermosynechococcus elongatus
ASVVPQERQQDTRKHYPNYKVIVLNDDFNTIQHVVACLKKYIPNMISDRAWELTNQVHYGGRANVWVGPQEQAELYHEQLLRAGLTMAPLEPEGS

SEQ ID NO: 3759 - protein, 95 aa, Thermosynechococcus elongatus
ASVVPQERQQDTRKHYPNYKVIVLNDDFNTIQHVVACLKKYIPNMISDRAWELTNQVHYGGRAIVWVGPQEQAELYHEQLLRAGLTMAPLEPEGS

SEQ ID NO: 3760 - protein, 95 aa, Thermosynechococcus elongatus
ASVVPQERQQDTRKHYPNYKVIVLNDDFNTIRHDAACLMKYIPNMTSDRAWELTNQVHYEGLAIVWVGPQEQAELYHEQLVRAGLTMAPLEPEGS

SEQ ID NO: 3761 - protein, 37 aa, Thermosynechococcus elongatus
ASVVPQERQQDTRKHYPNYKVIVLNDDFNTIRHDVAC

SEQ ID NO: 3762 - protein, 95 aa, Thermosynechococcus elongatus
ASVVPQERQQDTRKHYPNYKVIVLNDDFNTIRHVDACLMKYIPNMTSDRAWELTNQLHYEGQAIVWVGPQEQAELYHEQLLRSGFTMAPLEPEGS

SEQ ID NO: 3763 - protein, 81 aa, Thermosynechococcus elongatus
ASVVPQERQQDTRKHYPNYKVIVLNDDFNTIRHVAASLMKYIPNMTSDRAWELTNQVHFDGQAFVWVGPQELAELYHDLWL

SEQ ID NO: 3764 - protein, 58 aa, Thermosynechococcus elongatus
ASVVPQERQQDTRKHYPNYKVIVLNDDFNTIRHVAACMMKYIPNMTSDRAWELTNQVH

SEQ ID NO: 3765 - protein, 37 aa, Thermosynechococcus elongatus
ASVVPQERQQDTRKHYPNYKVIVLNDDFNTIRHVAAC

SEQ ID NO: 3766 - protein, 95 aa, Thermosynechococcus elongatus
ASVVPQERQQDTRKHYPNYKVIVLNDDFNTIRHVAACLMKYIPNKTSDRAWELTNQVHYEGQAIVWVGPQEQAELYHEQLLRAGLTMAPLEPGGS

SEQ ID NO: 3767 - protein, 95 aa, Thermosynechococcus elongatus
ASVVPQERQQDTRKHYPNYKVIVLNDDFNTIRHVAACLMKYIPNKTSDRAWELTNQVHYEGLAIVWVGPQEQAELYHEQLLRAGLTMAPLEPEGS

SEQ ID NO: 3768 - protein, 95 aa, Thermosynechococcus elongatus
ASVVPQERQQDTRKHYPNYKVIVLNDDFNTIRHVAACLMKYIPNKTSDRAWELTNQVHYECQAIVWVGPQEQSELFHEQLLRAGLTMAPLEPEGS

SEQ ID NO: 3769 - protein, 95 aa, Thermosynechococcus elongatus
ASVVPQERQQDTRKHYPNYKVIVLNDDFNTIRHVAACLMKYIPNMTSDRACELTNQVHYEGHAIVWVGPLEQAELYHEHLLRAGLTMAPLEPEGS

SEQ ID NO: 3770 - protein, 95 aa, Thermosynechococcus elongatus
ASVVPQERQQDTRKHYPNYKVIVLNDDFNTIRHVAACLMKYIPNMTSDRAWELTNQVHYKGQAIVWVGPQEQAELNHEQLLRAGLTMAPLEPEGS

SEQ ID NO: 3771 - protein, 95 aa, Thermosynechococcus elongatus
ASVVPQERQQDTRKHYPNYKVIVLNDDFNTIRHVAACLMKYIPNMTSDRAWELTNQVHYEGQAIVWVGPQEQAELYHEQLLRAGLTMATLEPEGS

SEQ ID NO: 3772 - protein, 95 aa, Thermosynechococcus elongatus
ASVVPQERQQDTRKHYPNYKVIVLNDDFNTIRHVAACLMKYIPNMTSDRAWELTNQVHYEGLAIVWVGPQEQAELYHEQLLRAGLSMAPLEPEGS

SEQ ID NO: 3773 - protein, 77 aa, Thermosynechococcus elongatus
ASVVPQERQQDTRKHYPNYKVIVLNDDFNTIRHVAACLMKYIPNMTSDRAWELTNQVHYECQAIVWVGQQEQAELYQ

SEQ ID NO: 3774 - protein, 95 aa, Thermosynechococcus elongatus
ASVVPQERQQDTRKHYPNYKVIVLNDDFNTIRHVAACLMKYIPNMTSDRAWELTNQVHYVGQAIVWVGPQEQAELYHEQLWRTGLTMAPLEPEGS

SEQ ID NO: 3775 - protein, 95 aa, Thermosynechococcus elongatus
ASVVPQERQQDTRKHYPNYKVIVLNDDFNTIRHVAACLMKYIPNMTSDRAWELTNQVHYVGQAIVWVGPQEQAELYHEQLLRAGLTMAPLEPGGS

SEQ ID NO: 3776 - protein, 95 aa, Thermosynechococcus elongatus
ASVVPQERQQDTRKHYPNYKVIVLNDDFNTIRHVAACLMKYIPNMTSDRAWELTNQVHFEGLAIVWVGPQEQAELYHEQLLRAGLTMAPFEPEGS

SEQ ID NO: 3777 - protein, 95 aa, Thermosynechococcus elongatus; identical to SEQ ID NO: 3770

SEQ ID NO: 3778 - protein, 95 aa, Thermosynechococcus elongatus; identical to SEQ ID NO: 3770

SEQ ID NO: 3779 - protein, 95 aa, Thermosynechococcus elongatus
ASVVPQERQQDTRKHYPNYKVIVLNDDFNTIRHVAASLMKYIPNKTSDRAWELTNQVHYEGQAIVWVGPQEQAELYHEQLLRAGLTMAPLEPEGS

SEQ ID NO: 3780 - protein, 95 aa, Thermosynechococcus elongatus
ASVVPQERQQDTRKHYPNYKVIVLNDDFNTIRHVVACLKKYIPNMISDRAWELTNQVHYGGRSIVWVGPQEQAELYHEQLLRAGLTLAPLEREGS

SEQ ID NO: 3781 - protein, 95 aa, Thermosynechococcus elongatus
ASVVPQERQQDTRKHYPNYKVIVLNDDFNTIRHYAACLMKYIPNMTSDRAWELTNQVHFEGLSIVWVGPQEQAELYQEHLLRAGLTRAPLDPEGS

SEQ ID NO: 3782 - protein, 95 aa, Thermosynechococcus elongatus
ASVVPQERQQDTRKHYPNYKVIVLNDDFNTLRHVAACLMKYIPNKTSYRAWELTNQVHYEGQAIVWVGPQEQAELYHEQLLRAGLTMAPLEPGGS

SEQ ID NO: 3783 - protein, 95 aa, Thermosynechococcus elongatus; identical to SEQ ID NO: 553

SEQ ID NO: 3784 - protein, 95 aa, Thermosynechococcus elongatus
ASVVPQERQQDTRKHYPNYKVIVLNDDFNTVQHVVACLKKYIPNMISDRAWELTNQVHSGGRAIVWVGPQEQAELYHEQLLRAGLTMAPLEPEGS

SEQ ID NO: 3785 - protein, 95 aa, Thermosynechococcus elongatus
ASVVPQERQQDTRKHYPNYKVIVLNDDFNTVRHVAAGLMKYIPNMTSDRAWELTNQVHYKGQAIVWVGPQEQAELNHEQLLRAGLTMAPLEPEGS

SEQ ID NO: 3786 - protein, 95 aa, Thermosynechococcus elongatus
ASVVPQERQQDTRKHYPNYKVIVLNDDFNTVRHVAACLMKYIPNMTSDRAWELTNQVHYEGQAIVWVGPQEQAELYHEHLLRAGFTMAPLEPEGS

SEQ ID NO: 3787 - protein, 95 aa, Thermosynechococcus elongatus
ASVVPQERQQDTRKHYPNYKVIVLNDDFNTVRHVAACLMKYIPNMTSDRAWELTNQVHSEGQAIVWVGPQEQAELYHDQLLRAGLTMAPFEPEGS

SEQ ID NO: 3788 - protein, 95 aa, Thermosynechococcus elongatus
ASVVPQERQQDTRKHYPNYKVIVLNDDFNTVRPVAACLMKYIPNKTSDRAWELTNQVHYEGQAIVWVGPQEQAELYHEQLLRAGLTMAPLEPEGS

SEQ ID NO: 3789 - protein, 95 aa, Thermosynechococcus elongatus
ASVVPQERQQDTRKHYPNYKVIVLNDDFNTYRHVAACLMKYIPNKTSDRAWELTNQVHYEGQAIVWVGPQEQAELYHEQVLRAGLTMAPLEPEGS

SEQ ID NO: 3790 - protein, 95 aa, Thermosynechococcus elongatus
ASVVPQERQQDTRKHYPNYKVIVLNDDFNTYRHVAACLMKYIPNKTSDRAWELTNQVHYEGQAIVWVGPQEQAELYHEQLLRAGLTMAPLEPEGS

SEQ ID NO: 3791 - protein, 95 aa, Thermosynechococcus elongatus
ASVVPQERQQDTRKHYPNYKVIVLNDDFNTYRHVAACLMKYIPNKTSDRAWELTNQVHYEGQAIVWVGPQEQAELYHELLLRAGLTMAPLEPEGS

SEQ ID NO: 3792 - protein, 95 aa, Thermosynechococcus elongatus
ASVVPQERQQDTRKHYPNYKVIVLNDDFNTYRHVAACLMKYIPNMTSDRAWELTNQVHYEGQAIVWVGPQEQAELYHEQLWRAGLTMAPLEPEGS

SEQ ID NO: 3793 - protein, 95 aa, Thermosynechococcus elongatus; identical to SEQ ID NO: 554

SEQ ID NO: 3794 - protein, 95 aa, Thermosynechococcus elongatus
ASVVPQERQQDTRKHYPNYKVIVLNDDFNTYRHVAACLMKYIPNMTSDRAWELTNQVHYECQAIVWVGPQEQAELYHEQLLRAGLTMAPLEPEGS

SEQ ID NO: 3795 - protein, 95 aa, Thermosynechococcus elongatus
ASVVPQERQQDTRKHYPNYKVIVLNDDFNTYRHVAACLMKYIRNMTSDRAWELTNQVHYEVQAIVWVGPLEQAELYHEQLLRAGLTMAPLEPEGS

SEQ ID NO: 3796 - protein, 95 aa, Thermosynechococcus elongatus
ASVVPQERQQDTRKHYPNYKVIVLNDDFNTYRHVAACLMNYIPNKTSDRSWYLTNQFHLECISIVWVGPQVEADLFHEHLVRAGLTLATLDREGS

SEQ ID NO: 3797 - protein, 95 aa, Thermosynechococcus elongatus
ASVVPQERQQDTRKHYPNYKVIVLNDDFNTSRHVAACLMKYIPNKTSDRAWELTNQVHYEGQAIVWVGPQEQAELYHEQLLRAGLTMAPLEPEGS

SEQ ID NO: 3798 - protein, 95 aa, Thermosynechococcus elongatus
ASVVPQERQQDTRKHYPNYKVIVLNDDFNTLRHVAACLMKYIPNKTSDRAWELTNQVHYEGQAIVWVGPQEQAELYHEQLLRAGLTMAPLEPEGS

SEQ ID NO: 3799 - protein, 95 aa, Thermosynechococcus elongatus; identical to SEQ ID NO: 553

SEQ ID NO: 3800 - protein, 95 aa, Thermosynechococcus elongatus
ASVVPQERQQDTRKHYPNYKVIVLNDDFNTLRHVAACLMKYIPNMTSDRAWELTNQVHYGGRAIVWVGPQEQAELYHEQLLRAGLTMAPLEPEGS

SEQ ID NO: 3801 - protein, 95 aa, Thermosynechococcus elongatus
ASVVPQERQQDTRKHYPNYKVIVLNDDFNTFKHDVACLKKYIPNMISDRAWELTNKVHYGGRAIVWVGPQEQAELYHEQLLRAGLTMAPLEPEGS

SEQ ID NO: 3802 - protein, 95 aa, Thermosynechococcus elongatus
ASVVPQERQQDTRKHYPNYKVIVLNDDFNTFKHVVACLKKYIPNMISDRAWELTNQVHYGGRAIVWVGPQEQAELYHEQLLRAGLTMAPLEPEGS

SEQ ID NO: 3803 - protein, 40 aa, Thermosynechococcus elongatus
ASVVPQERQQDTRKHYPNYKVIVLNDDFNTFRHVDACLMK

SEQ ID NO: 3804 - protein, 95 aa, Thermosynechococcus elongatus
ASVVPQERQQDTRKHYPNYKVIVLNDDFNTFRHVDACLMKYIPNMTSDRAWELTNQVHYEGQAIVCVGPQEQAELYHEQLLRAGLTMAPLEPEGS

SEQ ID NO: 3805 - protein, 95 aa, Thermosynechococcus elongatus
ASVVPQERQQDTRKHYPNYKVIVLNDDFNTFRHVAACLMKYIQNMTSDRAWELTNQVQYEGQAIVWVCTQVQAELYHEQLLRAGLTMAPLEPGGS

SEQ ID NO: 3806 - protein, 95 aa, Thermosynechococcus elongatus; identical to SEQ ID NO: 117

SEQ ID NO: 3807 - protein, 95 aa, Thermosynechococcus elongatus; identical to SEQ ID NO: 245

SEQ ID NO: 3808 - protein, 95 aa, Thermosynechococcus elongatus; identical to SEQ ID NO: 564

SEQ ID NO: 3809 - protein, 95 aa, Thermosynechococcus elongatus
ASVVPQERQQDTRKHYPNYKVIVLNDDFNTFRHVAACLMKYIPNMTSDRAWELTNQVHYEAQAIVSVGPQERAELYHEQLLRAGLTMAPLEPEGS

SEQ ID NO: 3810 - protein, 95 aa, Thermosynechococcus elongatus; identical to SEQ ID NO: 197

SEQ ID NO: 3811 - protein, 95 aa, Thermosynechococcus elongatus; identical to SEQ ID NO: 7

SEQ ID NO: 3812 - protein, 95 aa, Thermosynechococcus elongatus; identical to SEQ ID NO: 1007

SEQ ID NO: 3813 - protein, 95 aa, Thermosynechococcus elongatus; identical to SEQ ID NO: 481

SEQ ID NO: 3814 - protein, 44 aa, Thermosynechococcus elongatus
ASVVPQERQQDTRKHYPNYKVIVLNDDFNTFRHVAACLMKYIPN

SEQ ID NO: 3815 - protein, 95 aa, Thermosynechococcus elongatus; identical to SEQ ID NO: 18

SEQ ID NO: 3816 - protein, 93 aa, Thermosynechococcus elongatus
ASVVPQERQQDTRKHYPNYKVIVLNDDFNTFRHVSACLMKYITNMTSDRAWELTNQVHYVGQAIVWVGPQEQAELYHEQLLRAGLTMAPLEPE

SEQ ID NO: 3817 - protein, 37 aa, Thermosynechococcus elongatus
ASVVPQERQQDTRKHYPNYKVIVLNDDFNTFQHDVAC

SEQ ID NO: 3818 - protein, 95 aa, Thermosynechococcus elongatus
ASVVPQERQQDTRKHYPNYKVIVLNDDFNTFQHDVACLKKYIPNMISDRAWELTNQVHYGGQAIVWVGPQEQAELYHEQLLRAGLTMAPLEPEGS

SEQ ID NO: 3819 - protein, 95 aa, Thermosynechococcus elongatus
ASVVPQERQQDTRKHYPNYKVIVLNDDFNTFQHAVACLKKYIPNMISDRAWELTNQVHYGGRAIVWVGPQEQAELYHEQLLRAGLTMAPLEPEGS

SEQ ID NO: 3820 - protein, 95 aa, Thermosynechococcus elongatus; identical to SEQ ID NO: 12

SEQ ID NO: 3821 - protein, 95 aa, Thermosynechococcus elongatus
ASVVPQERQQDTRKHYPNYKVIVLNDDFNTFQHVDACLKKYIPNMISDRAWELTNQVHYGGRAIVWVGPQEQAELYHEQLLRAGLTMAPLEPEGS

SEQ ID NO: 3822 - protein, 64 aa, Thermosynechococcus elongatus
ASVVPQERQQDTRKHYPNYKVIVLNDDFNTFQHVAACLTKFTTKVNLAFGLVHKYKLNYTTNNC

SEQ ID NO: 3823 - protein, 95 aa, Thermosynechococcus elongatus
ASVVPQERQQDTRKHYPNYKVIVLNDDFNTFQHVAACLKKYIPNMISDRAWELTNQVHYGGRAIVWVGPQEQAELYHEQWLRAGLTMAPLEPEGS

SEQ ID NO: 3824 - protein, 95 aa, Thermosynechococcus elongatus
ASVVPQERQQDTRKHYPNYKVIVLNDDFNTFQHVAACLMKYIPNMTSDRAWELTNQVHYDGQAIVWVGPQEQAELYHEQLLRAGLTMAPLEPEGS

SEQ ID NO: 3825 - protein, 58 aa, Thermosynechococcus elongatus
ASVVPQERQQDTRKHYPNYKVIVLNDDFNTFQHVAACLMKYIPNMTSDRAWELTNQVH

SEQ ID NO: 3826 - protein, 95 aa, Thermosynechococcus elongatus; identical to SEQ ID NO: 929

SEQ ID NO: 3827 - protein, 95 aa, Thermosynechococcus elongatus
ASVVPQERQQDTRKHYPNYKVIVLNDDFNTFQHVAACLMKYIPNMTSDRAWELTNQVHYEGQAIVRVGPQEQAELYHKQLLRAGLTMAPLEPGGS

SEQ ID NO: 3828 - protein, 95 aa, Thermosynechococcus elongatus
ASVVPQERQQDTRKHYPNYKVIVLNDDFNTFQHVAACLMKYIPNMTSDRAWELTNQVHYEGQAIVRVGPQEQAELYHKHLLRAGLTMAPLEPEGS

SEQ ID NO: 3829 - protein, 95 aa, Thermosynechococcus elongatus
ASVVPQERQQDTRKHYPNYKVIVLNDDFNTFQHVAACLMKYIPNMTSDRAWELTNQVHYEGQAIVWVGPQEQAELNHEQLLRAGLTMAPLEPEGS

SEQ ID NO: 3830 - protein, 95 aa, Thermosynechococcus elongatus; identical to SEQ ID NO: 210

SEQ ID NO: 3831 - protein, 95 aa, Thermosynechococcus elongatus
ASVVPQERQQDTRKHYPNYKVIVLNDDFNTFQHVAACLMKYIPNMTSDRAWELTNQVHYEGQAIVWVGPQEQAELYHEQFMRAGLTMAPLEPEGS

SEQ ID NO: 3832 - protein, 95 aa, Thermosynechococcus elongatus
ASVVPQERQQDTRKHYPNYKVIVLNDDFNTFQHVAACLMKYIPNMTSDRAWELTNQVHYEGQAIVWVGPQVQAELYHEQLLRAGLTMAPLEPEGS

SEQ ID NO: 3833 - protein, 95 aa, Thermosynechococcus elongatus; identical to SEQ ID NO: 460

SEQ ID NO: 3834 - protein, 95 aa, Thermosynechococcus elongatus
ASVVPQERQQDTRKHYPNYKVIVLNDDFNTFQHVAACLMKYIPNMTSDRAWELTNQVHYEGQAIVWVCPQVQAELYHEQLLRAGLTMAPLEPGGS

SEQ ID NO: 3835 - protein, 95 aa, Thermosynechococcus elongatus
ASVVPQERQQDTRKHYPNYKVIVLNDDFNTFQHVAACLMKYIPNMTSDRAWELTNQVHYGGQAIVWVGPQEQAELYHEQLLRAGLTMAPLEQEGS

SEQ ID NO: 3836 - protein, 95 aa, Thermosynechococcus elongatus
ASVVPQERQQDTRKHYPNYKVIVLNDDFNTFQHVAACLMKYIPNMTSDRAWELTNQVHYVGQAIVWVGPQEQAELSHEHFLRAGLTMAPLEPKGS

SEQ ID NO: 3837 - protein, 95 aa, Thermosynechococcus elongatus
ASVVPQERQQDTRKHYPNYKVIVLNDDFNTFQHVAACLMKYIPNMTSDRAWELTNQVHYVGRAIVWVGPQEQAELYHEQLLRAGLTMAPLEPEGS

SEQ ID NO: 3838 - protein, 95 aa, Thermosynechococcus elongatus
ASVVPQERQQDTRKHYPNYKVIVLNDDFNTFQHVAACLMKYIPNMTSDRAWELTNLVHYEGQAIVWVGPQEQAELYHEQLLRAGLTMAPLEPEGS

SEQ ID NO: 3839 - protein, 95 aa, Thermosynechococcus elongatus
ASVVPQERQQDTRKHYPNYKVIVLNDDFNTFQHVAACLMKYIPNMISDRAWELTNQVHYGGRAIVWVGPQEQAELYHEQLLRAGLTMAPLEPEGS

SEQ ID NO: 3840 - protein, 95 aa, Thermosynechococcus elongatus
ASVVPQERQQDTRKHYPNYKVIVLNDDFNTFQHVAACLMKYIPNMTSDRAWELTNQVHYKGQAIVWVGSQEQAELNHEQLLRAGLTMAPLEPEGS

SEQ ID NO: 3841 - protein, 95 aa, Thermosynechococcus elongatus; identical to SEQ ID NO: 210

SEQ ID NO: 3842 - protein, 95 aa, Thermosynechococcus elongatus; identical to SEQ ID NO: 12

SEQ ID NO: 3843 - protein, 95 aa, Thermosynechococcus elongatus
ASVVPQERQQDTRKHYPNYKVIVLNDDFNTFQHVVTCLKKYIPNMISDRAWELTNQVHYGGRAIVRVGPQEQAELYHKQLLRAGLTMAPLEPEGS

SEQ ID NO: 3844 - protein, 95 aa, Thermosynechococcus elongatus
ASVVPQERQQDTRKHYPNYKVIVLNDDFNTFQHVVECLKKYIPNMISDRAWELTNQVHYGGRAIVWVGPQEQAELYHEQLLRAGLTMAPLEPEGS

SEQ ID NO: 3845 - protein, 95 aa, Thermosynechococcus elongatus
ASVVPQERQQDTRKHYPNYKVIVLNDDFNTFQHVVAYLKKYIPNMISDRAWELTNQVLYGGRAIVWVGPQEQAELYHEQLLRAGLTMAPLEPEGS

SEQ ID NO: 3846 - protein, 95 aa, Thermosynechococcus elongatus
ASVVPQERQQDTRKHYPNYKVIVLNDDFNTFQHVVACMKKYIPNMISDRAWELTNQVHYGGRAIVWVGPQEQAELYHEQLLRAGLTMAPLEPEGS

SEQ ID NO: 3847 - protein, 95 aa, Thermosynechococcus elongatus
ASVVPQERQQDTRKHYPNYKVIVLNDDFNTFQHVVACLKKYIQNMISDRAWELTNQVHYGGRAIVWVGPQEQAELYHEQLLRAGLTMAPLEPEGS

SEQ ID NO: 3848 - protein, 95 aa, Thermosynechococcus elongatus
ASVVPQERQQDTRKHYPNYKVIVLNDDFNTFQHVVACLKKYIPNKTSDRAWELTNQVHYEGQAIVWVGPQEQAELYHEQLLRAGLTMAPLEPGGS

SEQ ID NO: 3849 - protein, 95 aa, Thermosynechococcus elongatus
ASVVPQERQQDTRKHYPNYKVIVLNDDFNTFQHVVACLKKYIPNMNSDRAWELTNQVHYKGQAIVWVGPQEQAELNHEQLLRAGLTMAPLEPEGS

SEQ ID NO: 3850 - protein, 95 aa, Thermosynechococcus elongatus
ASVVPQERQQDTRKHYPNYKVIVLNDDFNTFQHVVACLKKYIPNMTSDRAWELTNQVHYEGQAIVRVGPQEQAELYHKQLLRAGLTMAPLEPEGS

SEQ ID NO: 3851 - protein, 95 aa, Thermosynechococcus elongatus
ASVVPQERQQDTRKHYPNYKVIVLNDDFNTFQHVVACLKKYIPNMTSDRAWELTNQVHYEGQAIVWVGPQEQAELYHEQLLRAGLTMAPLEPGGS

SEQ ID NO: 3852 - protein, 95 aa, Thermosynechococcus elongatus
ASVVPQERQQDTRKHYPNYKVIVLNDDFNTFQHVVACLKKYIPNMTSDRAWELTNQVHYVGQAIVWVGPQEQAELYHEQLLRAGLTMAPLEPKGS

SEQ ID NO: 3853 - protein, 95 aa, Thermosynechococcus elongatus
ASVVPQERQQDTRKHYPNYKVIVLNDDFNTFQHVVACLKKYIPNMITDRAWELTNQVHYGGRAIVWVGPQEQAELYHEQLLRAGLTMAPLEPEGS

SEQ ID NO: 3854 - protein, 95 aa, Thermosynechococcus elongatus
ASVVPQERQQDTRKHYPNYKVIVLNDDFNTFQHVVACLKKYIPNMIYDRAWELTNQVHYGGRAIVWVGPQEQAELYHEQLLRAGLTMAPLEPEGS

SEQ ID NO: 3855 - protein, 95 aa, Thermosynechococcus elongatus
ASVVPQERQQDTRKHYPNYKVIVLNDDFNTFQHVVACLKKYIPNMISDRDWELTNQVHYGGRAIVWVGPQEQAELYHEQLLRAGLTMAPLEPEGS

SEQ ID NO: 3856 - protein, 95 aa, Thermosynechococcus elongatus
ASVVPQERQQDTRKHYPNYKVIVLNDDFNTFQHVVACLKKYIPNMISDRAWESTNQVHYGGRAIVWVGPQEQAELYHEQLLRAGLTMAPLEPEGS

SEQ ID NO: 3857 - protein, 95 aa, Thermosynechococcus elongatus; identical to SEQ ID NO: 12

SEQ ID NO: 3858 - protein, 95 aa, Thermosynechococcus elongatus
ASVVPQERQQDTRKHYPNYKVIVLNDDFNTFQHVVACLKKYIPNMISDRAWELTNQLHYGGRAIVWVGPQEQAELYHEQLLRAGLTMAPLEPEGS

SEQ ID NO: 3859 - protein, 95 aa, Thermosynechococcus elongatus
ASVVPQERQQDTRKHYPNYKVIVLNDDFNTFQHVVACLKKYIPNMISDRAWELTNQVHYEGQAIVWVGPQEQAELNHEQLLRAGLTMAPLEPEGS

SEQ ID NO: 3860 - protein, 95 aa, Thermosynechococcus elongatus
ASVVPQERQQDTRKHYPNYKVIVLNDDFNTFQHVVACLKKYIPNMISDRAWELTNQVHYEGQAIVRVGPQEQAELYHKQLLRAGLTMAPLEPEGS

SEQ ID NO: 3861 - protein, 95 aa, Thermosynechococcus elongatus; identical to SEQ ID NO: 3859

SEQ ID NO: 3862 - protein, 95 aa, Thermosynechococcus elongatus
ASVVPQERQQDTRKHYPNYKVIVLNDDFNTFQHVVACLKKYIPNMISDRAWELTNQVHYEGQAIVWVGPQEQAELYHEQLLRTGLTMAPLEPEGS

SEQ ID NO: 3863 - protein, 95 aa, Thermosynechococcus elongatus; identical to SEQ ID NO: 1437

SEQ ID NO: 3864 - protein, 95 aa, Thermosynechococcus elongatus; identical to SEQ ID NO: 211

SEQ ID NO: 3865 - protein, 95 aa, Thermosynechococcus elongatus
ASVVPQERQQDTRKHYPNYKVIVLNDDFNTFQHVVACLKKYIPNMISDRAWELTNQVHYEGQAIVWVGPREQAELYHEQLLRVGLTMAPLEPEGS

SEQ ID NO: 3866 - protein, 95 aa, Thermosynechococcus elongatus
ASVVPQERQQDTRKHYPNYKVIVLNDDFNTFQHVVACLKKYIPNMISDRAWELTNQVHYGGQAIVWVGPQVQAELYHEQLLRAGLTMAPLEPEGS

SEQ ID NO: 3867 - protein, 95 aa, Thermosynechococcus elongatus
ASVVPQERQQDTRKHYPNYKVIVLNDDFNTFQHVVACLKKYIPNMISDRAWELTNQVHYGGRATVWVGPQEQAELYHEQLLRAGLTMAPLEPEGS

SEQ ID NO: 3868 - protein, 95 aa, Thermosynechococcus elongatus; identical to SEQ ID NO: 1441

SEQ ID NO: 3869 - protein, 95 aa, Thermosynechococcus elongatus; identical to SEQ ID NO: 12

SEQ ID NO: 3870 - protein, 95 aa, Thermosynechococcus elongatus
ASVVPQERQQDTRKHYPNYKVIVLNDDFNTFQHVVACLKKYIPNMISDRAWELTNQVHYGGRAIDWVGPQEQAELYHEQVLRAGLTMAPLEPEGS

SEQ ID NO: 3871 - protein, 95 aa, Thermosynechococcus elongatus; identical to SEQ ID NO: 12

SEQ ID NO: 3872 - protein, 95 aa, Thermosynechococcus elongatus
ASVVPQERQQDTRKHYPNYKVIVLNDDFNTFQHVVACLKKYIPNMISDRAWELTNQVHYGGRAIVRVGPQEQAELYHKQLLRAGLTMAPLEPEGS

SEQ ID NO: 3873 - protein, 95 aa, Thermosynechococcus elongatus; identical to SEQ ID NO: 12

SEQ ID NO: 3874 - protein, 95 aa, Thermosynechococcus elongatus
ASVVPQERQQDTRKHYPNYKVIVLNDDFNTFQHVVACLKKYIPNMISDRAWELTNQVHYGGRAIVWVDPQEQAELYHEQLLRAGLTMAPLEPEGS

SEQ ID NO: 3875 - protein, 95 aa, Thermosynechococcus elongatus; identical to SEQ ID NO: 12

SEQ ID NO: 3876 - protein, 95 aa, Thermosynechococcus elongatus
ASVVPQERQQDTRKHYPNYKVIVLNDDFNTFQHVVACLKKYIPNMISDRAWELTNQVHYGGRAIVWVGPQEQAELYHEQLVRAGLTRAPLDPDGS

SEQ ID NO: 3877 - protein, 80 aa, Thermosynechococcus elongatus
ASVVPQERQQDTRKHYPNYKVIVLNDDFNTFQHVVACLKKYIPNMISDRAWELTNQVHYGGRAIVWVGPQEQAELYHEQL

SEQ ID NO: 3878 - protein, 95 aa, Thermosynechococcus elongatus
ASVVPQERQQDTRKHYPNYKVIVLNDDFNTFQHVVACLKKYIPNMISDRAWELTNQVHYGGRAIVWVGPQEQAELYHEQLLRTGLTMAPLEPEGS

SEQ ID NO: 3879 - protein, 95 aa, Thermosynechococcus elongatus; identical to SEQ ID NO: 3878

SEQ ID NO: 3880 - protein, 95 aa, Thermosynechococcus elongatus; identical to SEQ ID NO: 12

SEQ ID NO: 3881 - protein, 95 aa, Thermosynechococcus elongatus
ASVVPQERQQDTRKHYPNYKVIVLNDDFNTFQHVVACLKKYIPNMISDRAWELTNQVHYGGRAIVWVGPQEQAELYHEQLLRAGLTTAPLEPEGS

SEQ ID NO: 3882 - protein, 95 aa, Thermosynechococcus elongatus; identical to SEQ ID NO: 932

SEQ ID NO: 3883 - protein, 95 aa, Thermosynechococcus elongatus
ASVVPQERQQDTRKHYPNYKVIVLNDDFNTFQHVVACLKKYIPNMISDRAWELTNQVHYGGRAIVWVGPQEQAELYHEQLLRAGLTMAPPEPEGS

SEQ ID NO: 3884 - protein, 95 aa, Thermosynechococcus elongatus
ASVVPQERQQDTRKHYPNYKVIVLNDDFNTFQHVVACLKKYIPNMISDRAWELTNQVHYGGRAIVWVGPQEQAELYHEQLLRAGLTMAPLEQEGS

SEQ ID NO: 3885 - protein, 95 aa, Thermosynechococcus elongatus; identical to SEQ ID NO: 12

SEQ ID NO: 3886 - protein, 95 aa, Thermosynechococcus elongatus
ASVVPQERQQDTRKHYPNYKVIVLNDDFNTFQHVVACLKKYIPNMISDRAWELTNQVHYGGRAIVWVGPQEQAELYHEQLLRAGLTMAPLEREGS

SEQ ID NO: 3887 - protein, 95 aa, Thermosynechococcus elongatus
ASVVPQERQQDTRKHYPNYKVIVLNDDFNTFQHVVACLKKYIPNMISDRAWELTNQVHYGGRAIVWVGPQEQAELYHEQLLRAGLTMAPLESEGS

SEQ ID NO: 3888 - protein, 90 aa, Thermosynechococcus elongatus
ASVVPQERQQDTRKHYPNYKVIVLNDDFNTFQHVVACLKKYIPNMISDRAWELTNQVHYGGRAIVWVGPQEQAELYHEQLLRAGLTMAPL

SEQ ID NO: 3889 - protein, 95 aa, Thermosynechococcus elongatus; identical to SEQ ID NO: 12

SEQ ID NO: 3890 - protein, 95 aa, Thermosynechococcus elongatus
ASVVPQERQQDTRKHYPNYKVIVLNDDFNTFQHVVACLKKYIPNMISDRAWELTNQVHYGGRAIVWVGPQEQAELYHEQLLRAGLTMAPLEPKGS

SEQ ID NO: 3891 - protein, 95 aa, Thermosynechococcus elongatus
ASVVPQERQQDTRKHYPNYKVIVLNDDFNTFQHVVACLKKYIPNMISDRAWELTNQVHYGGRAIVWVGPQEQAELYHEQLLRAGLTISPLEPEGS

SEQ ID NO: 3892 - protein, 95 aa, Thermosynechococcus elongatus
ASVVPQERQQDTRKHYPNYKVIVLNDDFNTFQHVVACLKKYIPNMISDRAWELTNQVHYGGRAIVWVGPQEQAELYHEQLLRAGLTVAPLEPEGS

SEQ ID NO: 3893 - protein, 95 aa, Thermosynechococcus elongatus
ASVVPQERQQDTRKHYPNYKVIVLNDDFNTFQHVVACLKKYIPNMISDRAWELTNQVHYGGRAIVWVGPQEQAELYHEQLLRAGLTLAPLEPEGS

SEQ ID NO: 3894 - protein, 95 aa, Thermosynechococcus elongatus
ASVVPQERQQDTRKHYPNYKVIVLNDDFNTFQHVVACLKKYIPNMISDRAWELTNQVHYGGRAIVWVGPQEQAELYHEQLLRVGLTMAPLEPEGS

SEQ ID NO: 3895 - protein, 95 aa, Thermosynechococcus elongatus
ASVVPQERQQDTRKHYPNYKVIVLNDDFNTFQHVVACLKKYIPNMISDRAWELTNQVHYGGRAIVWVGPQEQAELYHEQLLIAGLTMAPLEPEGS

SEQ ID NO: 3896 - protein, 95 aa, Thermosynechococcus elongatus; identical to SEQ ID NO: 3895

SEQ ID NO: 3897 - protein, 95 aa, Thermosynechococcus elongatus
ASVVPQERQQDTRKHYPNYKVIVLNDDFNTFQHVVACLKKYIPNMISDRAWELTNQVHYGGRAIVWVGPQEQAELYHEHLLRAGLTMAPLEPGGS

SEQ ID NO: 3898 - protein, 95 aa, Thermosynechococcus elongatus
ASVVPQERQQDTRKHYPNYKVIVLNDDFNTFQHVVACLKKYIPNMISDRAWELTNQVHYGGRAIVWVGPQEQAELYHELLLRAGLTMAPLEPEGS

SEQ ID NO: 3899 - protein, 95 aa, Thermosynechococcus elongatus
ASVVPQERQQDTRKHYPNYKVIVLNDDFNTFQHVVACLKKYIPNMISDRAWELTNQVHYGGRAIVWVGPQEQAELYHDQLLRAGLTMAPLEPEGS

SEQ ID NO: 3900 - protein, 95 aa, Thermosynechococcus elongatus; identical to SEQ ID NO: 12

SEQ ID NO: 3901 - protein, 95 aa, Thermosynechococcus elongatus
ASVVPQERQQDTRKHYPNYKVIVLNDDFNTFQHVVACLKKYIPNMISDRAWELTNQVHYGGRAIVWVGPQEQVELYHEQLLRAGLTMAPLEPEGS

SEQ ID NO: 3902 - protein, 95 aa, Thermosynechococcus elongatus
ASVVPQERQQDTRKHYPNYKVIVLNDDFNTFQHVVACLKKYIPNMISDRAWELTNQVHYGGRAIVWVGPQEQSELYHEQLLRAGLTMAPLEPEGS

SEQ ID NO: 3903 - protein, 95 aa, Thermosynechococcus elongatus
ASVVPQERQQDTRKHYPNYKVIVLNDDFNTFQHVVACLKKYIPNMISDRAWELTNQVHYGGRAIVWVGPQAQAELYHEQLLRAGLTMAPLEPEGS

SEQ ID NO: 3904 - protein, 95 aa, Thermosynechococcus elongatus; identical to SEQ ID NO: 263

SEQ ID NO: 3905 - protein, 95 aa, Thermosynechococcus elongatus
ASVVPQERQQDTRKHYPNYKVIVLNDDFNTFQHVVACLKKYIPNMISDRAWELTNQVHYGGRAIVWVGPREQAELYHEQLLRVGLTMSPLEPEGS

SEQ ID NO: 3906 - protein, 95 aa, Thermosynechococcus elongatus
ASVVPQERQQDTRKHYPNYKVIVLNDDFNTFQHVVACLKKYIPNMISDRAWELTNQVHYGGRAIVWFGPQERAELYHEQLLRAGLTMAPLEPEGS

SEQ ID NO: 3907 - protein, 79 aa, Thermosynechococcus elongatus
ASVVPQERQQDTRKHYPNYKVIVLNDDFNTFQHVVACLKKYIPNMISDRAWELTNQVHYGGRAIVLVGPQEQAELYHEQ

SEQ ID NO: 3908 - protein, 95 aa, Thermosynechococcus elongatus
ASVVPQERQQDTRKHYPNYKVIVLNDDFNTFQHVVACLKKYIPNMISDRAWELTNQVHYGGRAIVLVGPQEQAELYHEQLLRAGLTMAPLEPEGS

SEQ ID NO: 3909 - protein, 95 aa, Thermosynechococcus elongatus
ASVVPQERQQDTRKHYPNYKVIVLNDDFNTFQHVVACLKKYIPNMISDRAWELTNQVHYGGRAIFWVGPQEQAELNHEQLLRAGLTMAPLEPEGS

SEQ ID NO: 3910 - protein, 95 aa, Thermosynechococcus elongatus
ASVVPQERQQDTRKHYPNYKVIVLNDDFNTFQHVVACLKKYIPNMISDRAWELTNQVHYGGRAIVWVGPQEQAELYQEQLLRAGLTMAPLEPEGS

SEQ ID NO: 3911 - protein, 77 aa, Thermosynechococcus elongatus
ASVVPQERQQDTRKHYPNYKVIVLNDDFNTFQHVVACLKKYIPNMISDRAWELTNQVHYGCRAIVWVCKQEQAELYH

SEQ ID NO: 3912 - protein, 95 aa, Thermosynechococcus elongatus
ASVVPQERQQDTRKHYPNYKVIVLNDDFNTFQHVVACLKKYIPNMISDRAWELTNQVHYVGQAIVWVGPQEQAELYHEQLLRAGLTMAPLEPEGS

SEQ ID NO: 3913 - protein, 95 aa, Thermosynechococcus elongatus
ASVVPQERQQDTRKHYPNYKVIVLNDDFNTFQHVVACLKKYIPNMISDRAWELTNQVHYVGQAIVWVGPQERAELYHEQLLRAGLTMAPLEPEGS

SEQ ID NO: 3914 - protein, 95 aa, Thermosynechococcus elongatus
ASVVPQERQQDTRKHYPNYKVIVLNDDFNTFQHVVACLKKYIPNMISDRAWELTNQVHYVGRAIVWVCPQEQAELYHEQLLRAGLTMAPLEPEGS

SEQ ID NO: 3915 - protein, 59 aa, Thermosynechococcus elongatus
ASVVPQERQQDTRKHYPNYKVIVLNDDFNTFQHVVACLKKYIPNMISDRAWELTNQVHY

SEQ ID NO: 3916 - protein, 95 aa, Thermosynechococcus elongatus
ASVVPQERQQDTRKHYPNYKVIVLNDDFNTFQHVVACLKKYIPNMISDRAWELTNQVHFGGRAIVWVGPQEQAVLYHEQLLRAGLTMATLEPEGS

SEQ ID NO: 3917 - protein, 95 aa, Thermosynechococcus elongatus
ASVVPQERQQDTRKHYPNYKVIVLNDDFNTFQHVVACLKKYIPNMISDRAWELTNQVLYGGRAIVWVGPQEQAELYHEQLLRAGLTMAPLEPEGS

SEQ ID NO: 3918 - protein, 95 aa, Thermosynechococcus elongatus
ASVVPQERQQDTRKHYPNYKVIVLNDDFNTFQHVVACLKKYIPNMISDRAWDLTNQVHYEGQAIVWVGPQEQAELYHEQLLRAGLTMAPLEPEGS

SEQ ID NO: 3919 - protein, 51 aa, Thermosynechococcus elongatus; identical to SEQ ID NO: 1450

SEQ ID NO: 3920 - protein, 95 aa, Thermosynechococcus elongatus
ASVVPQERQQDTRKHYPNYKVIVLNDDFNTFQHVVACLKKYIPNMISDRACELTNQVHYGGRAIDWVAPQEQAELYHEQLLRACLTIAPLEPEGS

SEQ ID NO: 3921 - protein, 95 aa, Thermosynechococcus elongatus
ASVVPQERQQDTRKHYPNYKVIVLNDDFNTFQHVVACLKKYIPNMISDRALELTNQVHYEGQAIVWVGPQVQAELYHEQLLRAGLTMAPLEPGGS

SEQ ID NO: 3922 - protein, 95 aa, Thermosynechococcus elongatus
ASVVPQERQQDTRKHYPNYKVIVLNDDFNTFQHVVACLKKYIPNMISDRALELTNQVHYGGRAIVWVGPQEQAELYHEQLLRAGLTMAPLEPEGS

SEQ ID NO: 3923 - protein, 95 aa, Thermosynechococcus elongatus
ASVVPQERQQDTRKHYPNYKVIVLNDDFNTFQHVVACLKKYIPNMISDIAWELTNQVHYGGRAIVWVGPQEQAELYHEQLLRAGLTMAPLEPEGS

SEQ ID NO: 3924 - protein, 95 aa, Thermosynechococcus elongatus
ASVVPQERQQDTRKHYPNYKVIVLNDDFNTFQHVVACLKKYIPNMVSDRAWELTNQVHYGGRAIVWVGPQEQAELYHEQLLRAGLTMAPLEPEGS

SEQ ID NO: 3925 - protein, 95 aa, Thermosynechococcus elongatus
ASVVPQERQQDTRKHYPNYKVIVLNDDFNTFQHVVACLKKYIPKMISDRAWELTNHVHYGGRAIVWVGPQEQAELYHEQLLRAGLTMAPLEPEGS

SEQ ID NO: 3926 - protein, 95 aa, Thermosynechococcus elongatus; identical to SEQ ID NO: 393

SEQ ID NO: 3927 - protein, 95 aa, Thermosynechococcus elongatus
ASVVPQERQQDTRKHYPNYKVIVLNDDFNTFQHVVACLKKYVPNMISDRAWELTNQVHYGGRAIVWVGPQEQAELYHEQLLRAGLTMAPLEPEGS

SEQ ID NO: 3928 - protein, 95 aa, Thermosynechococcus elongatus; identical to SEQ ID NO: 691

SEQ ID NO: 3929 - protein, 95 aa, Thermosynechococcus elongatus; identical to SEQ ID NO: 343

SEQ ID NO: 3930 - protein, 95 aa, Thermosynechococcus elongatus
ASVVPQERQQDTRKHYPNYKVIVLNDDFNTFQHVVACLMKYIPNMTSDRAWELTNQVHYEGQAIVWVGPQEQAELYHEQLLRAGLTMAPLEPGGS

SEQ ID NO: 3931 - protein, 95 aa, Thermosynechococcus elongatus
ASVVPQERQQDTRKHYPNYKVIVLNDDFNTFQHVVACLMKYIPNMTSDRAWELTNQVLYEGQAIVWVGPQEQAELYHEQLLRAGLTMAPLEPGGS

SEQ ID NO: 3932 - protein, 95 aa, Thermosynechococcus elongatus
ASVVPQERQQDTRKHYPNYKVIVLNDDFNTFQHVVACLMKYIPNMISDRAWELTNQVHYKGQAIVWVGPQEQAELNHEQLLRAGLTMAPLEPEGS

SEQ ID NO: 3933 - protein, 95 aa, Thermosynechococcus elongatus
ASVVPQERQQDTRKHYPNYKVIVLNDDFNTFQHVVACLMKYIPNMISDRAWELTNQVHYGGRAIVWVGPQEQAELYHEQLLRAGLTMAPLEPEGS

SEQ ID NO: 3934 - protein, 95 aa, Thermosynechococcus elongatus; identical to SEQ ID NO: 3933

SEQ ID NO: 3935 - protein, 95 aa, Thermosynechococcus elongatus
ASVVPQERQQDTRKHYPNYKVIVLNDDFNTFQHVVACLEKYIPNMISDRAWELTNQVHYGGRAIVWVGPQEQAELYHEQLLRAGLTMAPLEPEGS

SEQ ID NO: 3936 - protein, 95 aa, Thermosynechococcus elongatus; identical to SEQ ID NO: 461

SEQ ID NO: 3937 - protein, 95 aa, Thermosynechococcus elongatus; identical to SEQ ID NO: 3572

SEQ ID NO: 3938 - protein, 95 aa, Thermosynechococcus elongatus
ASVVPQERQQDTRKHYPNYKVIVLNDDFNTFQHFVACLKKYIPNMISDRAWELTNQVHYGGRAIFWVGPQEQAELYHEQLLRAGLTIAPLEPEGS

SEQ ID NO: 3939 - protein, 95 aa, Thermosynechococcus elongatus
ASVVPQERQQDTRKHYPNYKVIVLNDDFNTFQHFVACLKKYIPNMISDRAWELTNQVHYGCRAIVWVGPQEQAELYHEQLLRAGLTMAPFEPEGS

SEQ ID NO: 3940 - protein, 95 aa, Thermosynechococcus elongatus
ASVVPQERQQDTRKHYPNYKVIVLNDDFNTFPHVAACLMKYIPNMTSDRAWELTNQVHYEGQAIVWVGPQEQAELYHEQLLRAGLTMAPLEPEGS

SEQ ID NO: 3941 - protein, 95 aa, Thermosynechococcus elongatus
ASVVPQERQQDTRKHYPNYKVIVLNDDFNTFRQVAACLMKYIPNMTSDRAWELTNQVHYEGQAIVWVGPQEQAELYHEQLLRAGLTMAPLEPEGS

SEQ ID NO: 3942 - protein, 95 aa, Thermosynechococcus elongatus
ASVVPQERQQDTRKHYPNYKVIVLNDDFNTFRQVAACLMKYIPNMTSDRAWELTNQVHYEGQAIVWVGPQVQAELYHEQLLRAGLTMAQLEPGGS

SEQ ID NO: 3943 - protein, 95 aa, Thermosynechococcus elongatus
ASVVPQERQQDTRKHYPNYKVIVLNDDFNTFRHIAACLMKYIPNKTSDRAWELTNQVHYEGQAIVWVGPQEQAELYHEQLLRAGLTMAPLEPEGS

SEQ ID NO: 3944 - protein, 95 aa, Thermosynechococcus elongatus
ASVVPQERQQDTRKHYPNYKVIVLNDDFNTFRHLAACLMKYIPNKTSDRAWELTNQVHYEGQAIVWVGPQEQAELYHEQLLRAGLTMAPLEPEGS

SEQ ID NO: 3945 - protein, 95 aa, Thermosynechococcus elongatus
ASVVPQERQQDTRKHYPNYKVIVLNDDFNTFRHEAACLMKYIPNMTSDRAWELTNQVHYEGQAIVWVGPQVQAELYHEHLLRAGLTMAPLEPEGS

SEQ ID NO: 3946 - protein, 58 aa, Thermosynechococcus elongatus
ASVVPQERQQDTRKHYPNYKVIVLNDDFNTFRHEAACLMKYIPIMTSDRAWELTNKVL

SEQ ID NO: 3947 - protein, 95 aa, Thermosynechococcus elongatus
ASVVPQERQQDTRKHYPNYKVIVLNDDFNTFRHDAACMMKYIPNKTSDRAWELTNQVHYEGQAIVWVGPQEQAELYHEQLLRAGLTMAPLEPEGS

SEQ ID NO: 3948 - protein, 95 aa, Thermosynechococcus elongatus
ASVVPQERQQDTRKHYPNYKVIVLNDDFNTFRHDAACLMKYIPNKTSDRAWELTNQVHYEGQAIVWVGPQEQAELYHELLLSAGLTMAPLEPEGS

SEQ ID NO: 3949 - protein, 95 aa, Thermosynechococcus elongatus
ASVVPQERQQDTRKHYPNYKVIVLNDDFNTFRHDAACLMKYIPNMTSDRAWELTNQVHYEGQAIVWVGPQEQAELYHEQLVRAGLTMAPLEPEGS

SEQ ID NO: 3950 - protein, 95 aa, Thermosynechococcus elongatus
ASVVPQERQQDTRKHYPNYKVIVLNDDFNTFRHDAACLMKYIPNMTSDRAWELTNQVHYEGQAIVWVGPQEQAELYHEQLLRTGLTMAPLEPEGS

SEQ ID NO: 3951 - protein, 95 aa, Thermosynechococcus elongatus
ASVVPQERQQDTRKHYPNYKVIVLNDDFNTFRHDAACLMKYIPNMTSDRAWELTNQVHYEGQAIVWVGPQEQAELYHEQLLRAGLTMAPLEPDGS

SEQ ID NO: 3952 - protein, 95 aa, Thermosynechococcus elongatus
ASVVPQERQQDTRKHYPNYKVIVLNDDFNTFRHDAACLMKYIPNMTSDRAWELTNQVHYEGQAIVWVGPQVQAELYHEQLLRAGLTMAPLEPGGS

SEQ ID NO: 3953 - protein, 95 aa, Thermosynechococcus elongatus
ASVVPQERQQDTRKHYPNYKVIVLNDDFNTFRHDAACLMKYIPNMTSDRAWELTNQVHYEGLAIVWVGPQEQAELYHEHLLRAGLSMAPLEPEGS

SEQ ID NO: 3954 - protein, 95 aa, Thermosynechococcus elongatus
ASVVPQERQQDTRKHYPNYKVIVLNDDFNTFRHDAACLMKYIPNMTSDRAWELTNQVLYEGQAIVWVGPQEQAELYHEQLLRAGLTMAPLEPEGS

SEQ ID NO: 3955 - protein, 95 aa, Thermosynechococcus elongatus
ASVVPQERQQDTRKHYPNYKVIVLNDDFNTFRHDAAWLMKYIPNKTSDRAWELTNLVHYEGQAIVWVGPLVHADLYHVQLLRAGLTMAPLEPGGS

SEQ ID NO: 3956 - protein, 95 aa, Thermosynechococcus elongatus
ASVVPQERQQDTRKHYPNYKVIVLNDDFNTFRHAAACLMKYIPNMTSDRAWELTNQVHYGGRAIVWVGPQEQAELYHEQLLRAGLTMAPLEPEGS

SEQ ID NO: 3957 - protein, 95 aa, Thermosynechococcus elongatus
ASVVPQERQQDTRKHYPNYKVIVLNDDFNTFRHGAACLMKYIPNKTSDRAWELTNQVHYEGHAIVWVGPQEQAELYHEQLLRAGLTMAPLEPEGS

SEQ ID NO: 3958 - protein, 95 aa, Thermosynechococcus elongatus
ASVVPQERQQDTRKHYPNYKVIVLNDDFNTFRHGAACLMKYIPNMTSDRAWELTNQVHYEGQAIVWVDPQEQAELYHEQLLRAGLTMAPLEPEGS

SEQ ID NO: 3959 - protein, 95 aa, Thermosynechococcus elongatus; identical to SEQ ID NO: 3440

SEQ ID NO: 3960 - protein, 70 aa, Thermosynechococcus elongatus
ASVVPQERQQDTRKHYPNYKVIVLNDDFNTFRHGAACLMKYIPNMTSDRAWELTNQVHYEGQAIVWVGPQ

SEQ ID NO: 3961 - protein, 95 aa, Thermosynechococcus elongatus
ASVVPQERQQDTRKHYPNYKVIVLNDDFNTFRHVAASLMKYIPNMTSDRAWELTNQVHYEGQAIVWVGPQVQAELYHEQLLRAGLTMAPLEPGGS

SEQ ID NO: 3962 - protein, 95 aa, Thermosynechococcus elongatus; identical to SEQ ID NO: 4

SEQ ID NO: 3963 - protein, 95 aa, Thermosynechococcus elongatus; identical to SEQ ID NO: 7

SEQ ID NO: 3964 - protein, 95 aa, Thermosynechococcus elongatus
ASVVPQERQQDTRKHYPNYKVIVLNDDFNTFRHVAACLMKYIPNMTSDRAWELTNQVHYEGQAIVWVGPQEQAELYHELLLRAGLTRAPLEPEGS

SEQ ID NO: 3965 - protein, 95 aa, Thermosynechococcus elongatus; identical to SEQ ID NO: 40

SEQ ID NO: 3966 - protein, 95 aa, Thermosynechococcus elongatus
ASVVPQERQQDTRKHYPNYKVIVLNDDFNTFRHVAACLMKYIPNMTSDRAWELTNQVHYVGQDIVWVGPQVQAELYHEQLLRAGLTLAPLVPGGS

SEQ ID NO: 3967 - protein, 95 aa, Thermosynechococcus elongatus; identical to SEQ ID NO: 482

SEQ ID NO: 3968 - protein, 44 aa, Thermosynechococcus elongatus; identical to SEQ ID NO: 3814

SEQ ID NO: 3969 - protein, 95 aa, Thermosynechococcus elongatus; identical to SEQ ID NO: 4

SEQ ID NO: 3970 - protein, 95 aa, Thermosynechococcus elongatus; identical to SEQ ID NO: 2

SEQ ID NO: 3971 - protein, 95 aa, Thermosynechococcus elongatus; identical to SEQ ID NO: 955

SEQ ID NO: 3972 - protein, 95 aa, Thermosynechococcus elongatus; identical to SEQ ID NO: 4

SEQ ID NO: 3973 - protein, 95 aa, Thermosynechococcus elongatus; identical to SEQ ID NO: 2

SEQ ID NO: 3974 - protein, 95 aa, Thermosynechococcus elongatus; identical to SEQ ID NO: 2

SEQ ID NO: 3975 - protein, 95 aa, Thermosynechococcus elongatus
ASVVPQERQQDTRKHYPNYKVIVLNDDFNTFRHVAACLMKYIPNMTSDRAWELTNHVHYEGLAIVWVGPQVQAELYHEHLLRAGLTLAPLEPGGS

SEQ ID NO: 3976 - protein, 95 aa, Thermosynechococcus elongatus
ASVVPQERQQDTRKHYPNYKVIVLNDDFNTFRHVDACLMKYIPNKTSDRAWELTNQVHYEGQAIVWVGPQEQAELYHEQLLRAGLTMAPLEPEGS

SEQ ID NO: 3977 - protein, 95 aa, Thermosynechococcus elongatus
ASVVPQERQQDTRKHYPNYKVIVLNDDFNTFRHVDACLMKYIPNKTSDRAWELTNQVHYEGQAIVWVGPQEQAELFHEHLLRAGLTMAPLDPEGS

SEQ ID NO: 3978 - protein, 95 aa, Thermosynechococcus elongatus
ASVVPQERQQDTRKHYPNYKVIVLNDDFNTFRHVDACLMKYIPNKSSDRAWELTNQVHYGGRAIVWVGPQEQAELYHEQLLRAGLTMAPLEPEGS

SEQ ID NO: 3979 - protein, 95 aa, Thermosynechococcus elongatus
ASVVPQERQQDTRKHYPNYKVIVLNDDFNTFRHVDACLMKYIPNMTSDRAWELTNQVHYEGQAIVWVGPQEQAELYHEQLLRAGLTMAPLEPEGS

SEQ ID NO: 3980 - protein, 95 aa, Thermosynechococcus elongatus
ASVVPQERQQDTRKHYPNYKVIVLNDDFNTFRHVDACLMKYIPNMTSDRAWELTNQVHYGGRAIVWVGPQEQAELYHEQLLRAGLTMAPLEPEGS

SEQ ID NO: 3981 - protein, 95 aa, Thermosynechococcus elongatus; identical to SEQ ID NO: 4

SEQ ID NO: 3982 - protein, 95 aa, Thermosynechococcus elongatus; identical to SEQ ID NO: 16

SEQ ID NO: 3983 - protein, 95 aa, Thermosynechococcus elongatus; identical to SEQ ID NO: 167

SEQ ID NO: 3984 - protein, 95 aa, Thermosynechococcus elongatus
ASVVPQERQQDTRKHYPNYKVIVLNDDFNTFRHVATCLMKYIPNMTSDRAWELTNQVQYEGQAIVWVGPQEQAELYHEQLLRAGLTMAPLEPEGS

SEQ ID NO: 3985 - protein, 58 aa, Thermosynechococcus elongatus
ASVVPQERQQDTRKHYPNYKVIVLNDDFNTFRHVAECLMKYIPNKTSDRAWELTNQVH

SEQ ID NO: 3986 - protein, 95 aa, Thermosynechococcus elongatus
ASVVPQERQQDTRKHYPNYKVIVLNDDFNTFRHVAECLMKYIPNKTSDRAWELTNQVHYEGQAIVWVGPQEQAELYHEQLLRAGLTMAPLEPEGS

SEQ ID NO: 3987 - protein, 95 aa, Thermosynechococcus elongatus
ASVVPQERQQDTRKHYPNYKVIVLNDDFNTFRHVAECLMKYIPNMTSDRAWELTNQVHYEGQDIVWVGPQEQAELYHEQLLRAGLTMAPLEPEGS

SEQ ID NO: 3988 - protein, 95 aa, Thermosynechococcus elongatus
ASVVPQERQQDTRKHYPNYKVIVLNDDFNTFRHVAECLMKYIPNMTSDRAWELTNQVHYEGQAIVWVGPQEQAELNHEQLLRAGLTMAPLEPEGS

SEQ ID NO: 3989 - protein, 36 aa, Thermosynechococcus elongatus; identical to SEQ ID NO: 556

SEQ ID NO: 3990 - protein, 95 aa, Thermosynechococcus elongatus
ASVVPQERQQDTRKHYPNYKVIVLNDDFNTFRHVAASLMKYIPNKTSDRAWELTNQVHYEGQAIVWVGPQEQAELYHEQLLRAGLTMAPLEPEGS

SEQ ID NO: 3991 - protein, 95 aa, Thermosynechococcus elongatus
ASVVPQERQQDTRKHYPNYKVIVLNDDFNTFRHVAASLMKYIPNMTSDRAWELTNQVHYEGQAIVWVGPQEQAVLYHEQLLRAGLTMAPLEPEGS

SEQ ID NO: 3992 - protein, 95 aa, Thermosynechococcus elongatus
ASVVPQERQQDTRKHYPNYKVIVLNDDFNTFRHVAAGLMKYIPNKTSDRAWELTNQVHYEGQAIVWVGPQEQAELYHEQLLRAGLTMAPLEPEGS

SEQ ID NO: 3993 - protein, 47 aa, Thermosynechococcus elongatus
ASVVPQERQQDTRKHYPNYKVIVLNDDFNTFRHVAAGLMKYFPFMTS

SEQ ID NO: 3994 - protein, 36 aa, Thermosynechococcus elongatus; identical to SEQ ID NO: 556

SEQ ID NO: 3995 - protein, 36 aa, Thermosynechococcus elongatus; identical to SEQ ID NO: 556

SEQ ID NO: 3996 - protein, 36 aa, Thermosynechococcus elongatus; identical to SEQ ID NO: 556

SEQ ID NO: 3997 - protein, 36 aa, Thermosynechococcus elongatus; identical to SEQ ID NO: 556

SEQ ID NO: 3998 - protein, 36 aa, Thermosynechococcus elongatus; identical to SEQ ID NO: 556

SEQ ID NO: 3999 - protein, 36 aa, Thermosynechococcus elongatus; identical to SEQ ID NO: 556

SEQ ID NO: 4000 - protein, 36 aa, Thermosynechococcus elongatus; identical to SEQ ID NO: 556

SEQ ID NO: 4001 - protein, 36 aa, Thermosynechococcus elongatus; identical to SEQ ID NO: 556

SEQ ID NO: 4002 - protein, 36 aa, Thermosynechococcus elongatus; identical to SEQ ID NO: 556

SEQ ID NO: 4003 - protein, 36 aa, Thermosynechococcus elongatus; identical to SEQ ID NO: 556

SEQ ID NO: 4004 - protein, 36 aa, Thermosynechococcus elongatus; identical to SEQ ID NO: 556

SEQ ID NO: 4005 - protein, 81 aa, Thermosynechococcus elongatus
ASVVPQERQQDTRKHYPNYKVIVLNDDFNTFRHVAACMMKYIPNKTSHRASELTIHFFCTLDQAVLYNEQLLRAGLTMAPL

SEQ ID NO: 4006 - protein, 95 aa, Thermosynechococcus elongatus
ASVVPQERQQDTRKHYPNYKVIVLNDDFNTFRHVAACMMKYIPNKTSDRAWELTNQVHYEGQAIVWVGPQEQAELYHEQLLRAGLTMAPLEPEGS

SEQ ID NO: 4007 - protein, 95 aa, Thermosynechococcus elongatus; identical to SEQ ID NO: 31

SEQ ID NO: 4008 - protein, 95 aa, Thermosynechococcus elongatus
ASVVPQERQQDTRKHYPNYKVIVLNDDFNTFRHVAACLMKYIPNMTSDRAWELTNQVHYEGQAIVWVAPQEQAELYHEQLLRAGLTMAPLEPEGS

SEQ ID NO: 4009 - protein, 95 aa, Thermosynechococcus elongatus; identical to SEQ ID NO: 2

SEQ ID NO: 4010 - protein, 95 aa, Thermosynechococcus elongatus; identical to SEQ ID NO: 7

SEQ ID NO: 4011 - protein, 51 aa, Thermosynechococcus elongatus; identical to SEQ ID NO: 409

SEQ ID NO: 4012 - protein, 95 aa, Thermosynechococcus elongatus
ASVVPQERQQDTRKHYPNYKVIVLNDDFNTFRHVAACVMKYIPNMTSDRAWELTNQVHYEGQAIVWVGPQVQAELYHEQLLRAGLTMAPLEPGGS

SEQ ID NO: 4013 - protein, 95 aa, Thermosynechococcus elongatus
ASVVPQERQQDTRKHYPNYKVIVLNDDFNTFRHVAACVMKYIPNMTSDRACELTNQVHYEGQAIVWVGPQEQAELYHEQLLRAGLTMAPLDPEGS

SEQ ID NO: 4014 - protein, 95 aa, Thermosynechococcus elongatus
ASVVPQERQQDTRKHYPNYKVIVLNDDFNTFRHVAACVMKYIPYKTSDRAWELTNQVHYEGLAIVWVGPQEQAELYHEQLLRAGLTMAPLEPEGS

SEQ ID NO: 4015 - protein, 37 aa, Thermosynechococcus elongatus
ASVVPQERQQDTRKHYPNYKVIVLNDDFNTFRHVAAC

SEQ ID NO: 4016 - protein, 37 aa, Thermosynechococcus elongatus; identical to SEQ ID NO: 4015

SEQ ID NO: 4017 - protein, 37 aa, Thermosynechococcus elongatus; identical to SEQ ID NO: 4015

SEQ ID NO: 4018 - protein, 37 aa, Thermosynechococcus elongatus; identical to SEQ ID NO: 4015

SEQ ID NO: 4019 - protein, 37 aa, Thermosynechococcus elongatus; identical to SEQ ID NO: 4015

SEQ ID NO: 4020 - protein, 37 aa, Thermosynechococcus elongatus; identical to SEQ ID NO: 4015

SEQ ID NO: 4021 - protein, 95 aa, Thermosynechococcus elongatus
ASVVPQERQQDTRKHYPNYKVIVLNDDFNTFRHVAACSMKYIPNKTSDRAWELTNQVHYEGQAIVWVGPQEQAELYHEQLLRAGLTMAPLEPEGS

SEQ ID NO: 4022 - protein, 95 aa, Thermosynechococcus elongatus; identical to SEQ ID NO: 941

SEQ ID NO: 4023 - protein, 95 aa, Thermosynechococcus elongatus
ASVVPQERQQDTRKHYPNYKVIVLNDDFNTFRHVAACSMKYIPNMTSDRAWELTNQVHYEGQAIVWVGPQVQAELYHEQLLRAGLTMAPLEPEGS

SEQ ID NO: 4024 - protein, 95 aa, Thermosynechococcus elongatus
ASVVPQERQQDTRKHYPNYKVIVLNDDFNTFRHVAACSMKYIPNMTSDRAWELTNQVHYEGQAIVWVGPQVQAELYHEQLLRAGLTMAPLEPGGS

SEQ ID NO: 4025 - protein, 95 aa, Thermosynechococcus elongatus
ASVVPQERQQDTRKHYPNYKVIVLNDDFNTFRHVAACSVKYIPNKTSDRAWELTNQVHYEGQAIVWVGPQEQAELYHEQLLRAGLTMAPLEPEGS

SEQ ID NO: 4026 - protein, 95 aa, Thermosynechococcus elongatus
ASVVPQERQQDTRKHYPNYKVIVLNDDFNTFRHVAACWMKYIPNKTSDRAWELTNQVHYEGQAIVWVGPQEQAELYHEQLLRAGLTRAPLEPEGS

SEQ ID NO: 4027 - protein, 38 aa, Thermosynechococcus elongatus
ASVVPQERQQDTRKHYPNYKVIVLNDDFNTFRHVAACL

SEQ ID NO: 4028 - protein, 95 aa, Thermosynechococcus elongatus; identical to SEQ ID NO: 40

SEQ ID NO: 4029 - protein, 95 aa, Thermosynechococcus elongatus; identical to SEQ ID NO: 1024

SEQ ID NO: 4030 - protein, 95 aa, Thermosynechococcus elongatus
ASVVPQERQQDTRKHYPNYKVIVLNDDFNTFRHVAACLKKYIPNKNSDRAWELTNQVHYVGLAIVWVGPQEQAELYHEQLLRAGLTMAPLEPEGS

SEQ ID NO: 4031 - protein, 95 aa, Thermosynechococcus elongatus
ASVVPQERQQDTRKHYPNYKVIVLNDDFNTFRHVAACLKKYIPNMTSDRAWELTNQVHYEGQAIVWVGPQVQAELYHEQLLRAGLTMAPLEPGGS

SEQ ID NO: 4032 - protein, 95 aa, Thermosynechococcus elongatus; identical to SEQ ID NO: 44

SEQ ID NO: 4033 - protein, 95 aa, Thermosynechococcus elongatus
ASVVPQERQQDTRKHYPNYKVIVLNDDFNTFRHVAACLKKYIPNMISDRAWELTNQVHYEGQAIVWVGPQEQAELYHEQLLRTGLTMAPLEPEGS

SEQ ID NO: 4034 - protein, 95 aa, Thermosynechococcus elongatus; identical to SEQ ID NO: 44

SEQ ID NO: 4035 - protein, 95 aa, Thermosynechococcus elongatus
ASVVPQERQQDTRKHYPNYKVIVLNDDFNTFRHVAACLKKYIPNMISDRAWELTNQVHYGGRAIVWVGPQEQAELNHEQLLRAGLTMAPLEPEGS

SEQ ID NO: 4036 - protein, 95 aa, Thermosynechococcus elongatus; identical to SEQ ID NO: 4035

SEQ ID NO: 4037 - protein, 95 aa, Thermosynechococcus elongatus
ASVVPQERQQDTRKHYPNYKVIVLNDDFNTFRHVAACLKKYIPNMISDRAWELTNQVHYGGRAIVWVGPQEQAELYHEQLLRAGLTMAPLEPKGS

SEQ ID NO: 4038 - protein, 95 aa, Thermosynechococcus elongatus
ASVVPQERQQDTRKHYPNYKVIVLNDDFNTFRHVAACLKKYIPNMISDRAWELTNQVHYGGRAIVWVGPQEQAELYHEQLLRAGLTMAPLEPGGS

SEQ ID NO: 4039 - protein, 95 aa, Thermosynechococcus elongatus
ASVVPQERQQDTRKHYPNYKVIVLNDDFNTFRHVAACLKKYIPNMISDRAWELTNQVHYGGRAIVWVGPQEQAELYHEQLLRAGLTMAPLDPEGS

SEQ ID NO: 4040 - protein, 95 aa, Thermosynechococcus elongatus; identical to SEQ ID NO: 4038

SEQ ID NO: 4041 - protein, 95 aa, Thermosynechococcus elongatus
ASVVPQERQQDTRKHYPNYKVIVLNDDFNTFRHVAACLKKYIPNMISDRAWELTNQVHYGGRAIVWVGPQEQAELYHEQLLRSGLTMAPLEPEGS

SEQ ID NO: 4042 - protein, 77 aa, Thermosynechococcus elongatus
ASVVPQERQQDTRKHYPNYKVIVLNDDFNTFRHVAACLKKYIPNMISDRAWELTNQVHYGGRAIVWVGPQEQAELYH

SEQ ID NO: 4043 - protein, 95 aa, Thermosynechococcus elongatus
ASVVPQERQQDTRKHYPNYKVIVLNDDFNTFRHVAACLKKYIPNMISDRAWELTNQVHYGGRAIVCVGPQEQAELYHEQLLRAGLTMAPLEPEGS

SEQ ID NO: 4044 - protein, 95 aa, Thermosynechococcus elongatus
ASVVPQERQQDTRKHYPNYKVIVLNDDFNTFRHVAACLKKYIPNMISDRAWDLTNQVHYGGRAIVWVGPQEQAELYHEHLLRAGLTMAPLEPEGS

SEQ ID NO: 4045 - protein, 95 aa, Thermosynechococcus elongatus
ASVVPQERQQDTRKHYPNYKVIVLNDDFNTFRHVAACLKKYIPNMISDRAWVLTNQVHYGGRAIVWVGPQEQAELYHEQLLRAGLTMAPLEPEGS

SEQ ID NO: 4046 - protein, 95 aa, Thermosynechococcus elongatus
ASVVPQERQQDTRKHYPNYKVIVLNDDFNTFRHVAACLKKYIPNMISDRAWVLTNQVHYGGRAIVWVGPQEQAELYHEQLFRAGLTMAPLEPEGS

SEQ ID NO: 4047 - protein, 95 aa, Thermosynechococcus elongatus
ASVVPQERQQDTRKHYPNYKVIVLNDDFNTFRHVAACLKKYIPNMISDIAWELTNQVHYGGRAIVWVGPQEQAELYHEQLLRAGLTMAPLEPEGS

SEQ ID NO: 4048 - protein, 95 aa, Thermosynechococcus elongatus
ASVVPQERQQDTRKHYPNYKVIVLNDDFNTFRHVAACLKKYIPNMISYRAWELTNQVHYGGRAIVWVGPQEQAELYHEQLLRAGLTMAPLEPEGS

SEQ ID NO: 4049 - protein, 95 aa, Thermosynechococcus elongatus
ASVVPQERQQDTRKHYPNYKVIVLNDDFNTFRHVAACLKKYIPNMTSDRAWELTNQVHYKGQAIVWVGTQEQAELNHEQLLRAGLTMAPLEPEGS

SEQ ID NO: 4050 - protein, 95 aa, Thermosynechococcus elongatus
ASVVPQERQQDTRKHYPNYKVIVLNDDFNTFRHVAACLIKYIPNMTSDRAWELTNQVHYEGQAIVWVGPQVQAELYHEQLLRAGLTMAPLEPGGS

SEQ ID NO: 4051 - protein, 95 aa, Thermosynechococcus elongatus
ASVVPQERQQDTRKHYPNYKVIVLNDDFNTFRHVAACLIKYIPNMTSDRAWELTNQVHYKGQAIVWVGPQEQAELNHEQLLRAGLTMAPLEPEGS

SEQ ID NO: 4052 - protein, 95 aa, Thermosynechococcus elongatus; identical to SEQ ID NO: 28

SEQ ID NO: 4053 - protein, 95 aa, Thermosynechococcus elongatus
ASVVPQERQQDTRKHYPNYKVIVLNDDFNTFRHVAACLMKNIPNMTSDRAWELTNQVHYEGQAIVWVGPPEQAELYHEQLLRAGLTMAPLEPEGS

SEQ ID NO: 4054 - protein, 40 aa, Thermosynechococcus elongatus; identical to SEQ ID NO: 462

SEQ ID NO: 4055 - protein, 40 aa, Thermosynechococcus elongatus; identical to SEQ ID NO: 462

SEQ ID NO: 4056 - protein, 40 aa, Thermosynechococcus elongatus; identical to SEQ ID NO: 462

SEQ ID NO: 4057 - protein, 40 aa, Thermosynechococcus elongatus; identical to SEQ ID NO: 462

SEQ ID NO: 4058 - protein, 40 aa, Thermosynechococcus elongatus; identical to SEQ ID NO: 462

SEQ ID NO: 4059 - protein, 95 aa, Thermosynechococcus elongatus
ASVVPQERQQDTRKHYPNYKVIVLNDDFNTFRHVAACLMKYNPNMTSDRAWELTNQVHYEGQAIVWVGPQEQAELYHEQLLRAGLTIAPLEPEGS

SEQ ID NO: 4060 - protein, 95 aa, Thermosynechococcus elongatus
ASVVPQERQQDTRKHYPNYKVIVLNDDFNTFRHVAACLMKYNPNMTSDRAWELTNQVHYEGQAIVWVGPQEQAELYHEQLLRAGLTMAPLEPGGS

SEQ ID NO: 4061 - protein, 95 aa, Thermosynechococcus elongatus
ASVVPQERQQDTRKHYPNYKVIVLNDDFNTFRHVAACLMKYNPNMTSDRAWELTNQVHYEGQAIVWVGPQVQAELYHEQLLRAGLTMAPLEPGGS

SEQ ID NO: 4062 - protein, 95 aa, Thermosynechococcus elongatus
ASVVPQERQQDTRKHYPNYKVIVLNDDFNTFRHVAACLMKYNPNMTSDRAWELTNQVHYGGRAIVWVGPQEQAELYHEQLLRAGLTMAPLEPEGS

SEQ ID NO: 4063 - protein, 95 aa, Thermosynechococcus elongatus
ASVVPQERQQDTRKHYPNYKVIVLNDDFNTFRHVAACLMKYNPNMTSDRAWELTNQVHYKGQAIVWVGPQEQAELNHEQLLRAGLTMAPLEPEGS

SEQ ID NO: 4064 - protein, 95 aa, Thermosynechococcus elongatus
ASVVPQERQQDTRKHYPNYKVIVLNDDFNTFRHVAACLMKYTPNMTSDRAWELTNQVHYEGQAIVWVGPQEQAELYHEQVLRAGLTMAPLEPEGS

SEQ ID NO: 4065 - protein, 95 aa, Thermosynechococcus elongatus; identical to SEQ ID NO: 7

SEQ ID NO: 4066 - protein, 61 aa, Thermosynechococcus elongatus
ASVVPQERQQDTRKHYPNYKVIVLNDDFNTFRHVAACLMKYITNKTSDRAWELTNQVHYEG

SEQ ID NO: 4067 - protein, 73 aa, Thermosynechococcus elongatus
ASVVPQERQQDTRKHYPNYKVIVLNDDFNTFRHVAACLMKYITNMTSDRDCELTNQVHYEGLAIVWVGPQEQA

SEQ ID NO: 4068 - protein, 95 aa, Thermosynechococcus elongatus
ASVVPQERQQDTRKHYPNYKVIVLNDDFNTFRHVAACLMKYITNMTSDRAWELTNQVHYEGQAIVWVGPQEQAELYHEQLLRAGLTMAPLEPGGS

SEQ ID NO: 4069 - protein, 95 aa, Thermosynechococcus elongatus
ASVVPQERQQDTRKHYPNYKVIVLNDDFNTFRHVAACLMKYITNMTSDRAWELTNQVHYEGQAIVWVGPQVQAELYHEQLLRAGLTMAPLEPGGS

SEQ ID NO: 4070 - protein, 95 aa, Thermosynechococcus elongatus
ASVVPQERQQDTRKHYPNYKVIVLNDDFNTFRHVAACLMKYITNMISDRAWELTKHVHYGGRAIVWVGPQELAELYHEQLLSAGLTMAPLEPEGS

SEQ ID NO: 4071 - protein, 95 aa, Thermosynechococcus elongatus
ASVVPQERQQDTRKHYPNYKVIVLNDDFNTFRHVAACLMKYIQNKTSDRAWELTNQVHYEGQAIVWVGPQEQAELYHEQLLRAGLTMAPLEPEGS

SEQ ID NO: 4072 - protein, 93 aa, Thermosynechococcus elongatus
ASVVPQERQQDTRKHYPNYKVIVLNDDFNTFRHVAACLMKYIQNMTSDRAWELTNQVQYEGQAIVWVGPQEQAELYHEQLLRAGLTLAPLEPE

SEQ ID NO: 4073 - protein, 95 aa, Thermosynechococcus elongatus
ASVVPQERQQDTRKHYPNYKVIVLNDDFNTFRHVAACLMKYIQNMTSDRAWELTNQVHYGGRAIVWVGPQEQAELYHEQLLRAGLTMAPLEPEGS

SEQ ID NO: 4074 - protein, 95 aa, Thermosynechococcus elongatus
ASVVPQERQQDTRKHYPNYKVIVLNDDFNTFRHVAACLMKYIQNMTSDRAWELTNQVHYKGQAIVWVGPQEQAELNHEQLLRAGLTMAPLEPEGS

SEQ ID NO: 4075 - protein, 95 aa, Thermosynechococcus elongatus
ASVVPQERQQDTRKHYPNYKVIVLNDDFNTFRHVAACLMKYIPNKTPDRAWELTNQVHYEGQAIVWVGPQEQAELYHEQLLRAGLTMAPLEPEGS

SEQ ID NO: 4076 - protein, 95 aa, Thermosynechococcus elongatus
ASVVPQERQQDTRKHYPNYKVIVLNDDFNTFRHVAACLMKYIPNKTYDRAWELTNQVHYEGQAIVWVGPQEQAELYHEQLLRAGLTMAPLEPEGS

SEQ ID NO: 4077 - protein, 95 aa, Thermosynechococcus elongatus
ASVVPQERQQDTRKHYPNYKVIVLNDDFNTFRHVAACLMKYIPNKTYDRAWELTNQVHYEGQAIVWVGPQVQAELYHEQLLRAGLTMAPLEPGGS

SEQ ID NO: 4078 - protein, 95 aa, Thermosynechococcus elongatus; identical to SEQ ID NO: 37

SEQ ID NO: 4079 - protein, 95 aa, Thermosynechococcus elongatus; identical to SEQ ID NO: 4

SEQ ID NO: 4080 - protein, 95 aa, Thermosynechococcus elongatus; identical to SEQ ID NO: 563

SEQ ID NO: 4081 - protein, 95 aa, Thermosynechococcus elongatus
ASVVPQERQQDTRKHYPNYKVIVLNDDFNTFRHVAACLMKYIPNKTSNRAWELTNQVHYEGQAIVRVGPQEQAELYHKQLLRAGLTMAPLEPEGS

SEQ ID NO: 4082 - protein, 95 aa, Thermosynechococcus elongatus
ASVVPQERQQDTRKHYPNYKVIVLNDDFNTFRHVAACLMKYIPNKTSDKAWELTNQVHYEGQAIVWVGPQEQAELYHEQLLRAGLTMAPLEPEGS

SEQ ID NO: 4083 - protein, 95 aa, Thermosynechococcus elongatus
ASVVPQERQQDTRKHYPNYKVIVLNDDFNTFRHVAACLMKYIPNKTSDRDWELTNQVHYEGLAIVWVGPQEQAELYHEHLLRAGLTMAPLEPEGS

SEQ ID NO: 4084 - protein, 95 aa, Thermosynechococcus elongatus
ASVVPQERQQDTRKHYPNYKVIVLNDDFNTFRHVAACLMKYIPNKTSDRDWELTNQVHYGGRAIVWVGPQEQAELYHEQLLRAGLTMAPLEPEGS

SEQ ID NO: 4085 - protein, 95 aa, Thermosynechococcus elongatus
ASVVPQERQQDTRKHYPNYKVIVLNDDFNTFRHVAACLMKYIPNKTSDRDWDLTNQVHYEGQAIVWVGPQEQAELYHEQLLRAGLTMAPLEPEGS

SEQ ID NO: 4086 - protein, 95 aa, Thermosynechococcus elongatus
ASVVPQERQQDTRKHYPNYKVIVLNDDFNTFRHVAACLMKYIPNKTSDRAWELTNQVHYEGQAIVWVSPQEQAELYHEQLLRAGLTMAPLEPEGS

SEQ ID NO: 4087 - protein, 95 aa, Thermosynechococcus elongatus; identical to SEQ ID NO: 956

SEQ ID NO: 4088 - protein, 95 aa, Thermosynechococcus elongatus
ASVVPQERQQDTRKHYPNYKVIVLNDDFNTFRHVAACLMKYIPNKTSDRAGELTNQVHYEGQAIVWVGPQEQAELYHEQLLRAGLTMAPLEPEGS

SEQ ID NO: 4089 - protein, 95 aa, Thermosynechococcus elongatus
ASVVPQERQQDTRKHYPNYKVIVLNDDFNTFRHVAACLMKYIPNKTSDRAGELTNQVHYVGQAIVWVGPQEQAELYHEQLLRAGLTMAPLEPKGS

SEQ ID NO: 4090 - protein, 50 aa, Thermosynechococcus elongatus
ASVVPQERQQDTRKHYPNYKVIVLNDDFNTFRHVAACLMKYIPNKTSDRA

SEQ ID NO: 4091 - protein, 95 aa, Thermosynechococcus elongatus
ASVVPQERQQDTRKHYPNYKVIVLNDDFNTFRHVAACLMKYIPNKTSDRACELTNQVHYEGQAIVWVGPQEQAELYHEQLLRAGLTMSPLEPEGS

SEQ ID NO: 4092 - protein, 95 aa, Thermosynechococcus elongatus
ASVVPQERQQDTRKHYPNYKVIVLNDDFNTFRHVAACLMKYIPNKTSDRACELTNQVHYEGQAIVWVGPQEQAGLYHEQLLRAGLTMAPLEPEGS

SEQ ID NO: 4093 - protein, 95 aa, Thermosynechococcus elongatus
ASVVPQERQQDTRKHYPNYKVIVLNDDFNTFRHVAACLMKYIPNKTSDRACELTNQVHYEGQAIVWVGPQEQSELYHEQLLRAGLTIAPLEPEGS

SEQ ID NO: 4094 - protein, 52 aa, Thermosynechococcus elongatus
ASVVPQERQQDTRKHYPNYKVIVLNDDFNTFRHVAACLMKYIPNKTSDRAWE

SEQ ID NO: 4095 - protein, 52 aa, Thermosynechococcus elongatus; identical to SEQ ID NO: 4094

SEQ ID NO: 4096 - protein, 95 aa, Thermosynechococcus elongatus
ASVVPQERQQDTRKHYPNYKVIVLNDDFNTFRHVAACLMKYIPNKTSDRAWESTNQVHYEGQAIVWVGQQEQAELYHEQLLRAGLTMAPLEPEGS

SEQ ID NO: 4097 - protein, 95 aa, Thermosynechococcus elongatus; identical to SEQ ID NO: 557

SEQ ID NO: 4098 - protein, 95 aa, Thermosynechococcus elongatus; identical to SEQ ID NO: 4

SEQ ID NO: 4099 - protein, 95 aa, Thermosynechococcus elongatus; identical to SEQ ID NO: 51

SEQ ID NO: 4100 - protein, 95 aa, Thermosynechococcus elongatus
ASVVPQERQQDTRKHYPNYKVIVLNDDFNTFRHVAACLMKYIPNKTSDRAWELTNKVHYEGQAIVWVGPQEQAELYHEQLLRAGLTMAPLEPGGS

SEQ ID NO: 4101 - protein, 95 aa, Thermosynechococcus elongatus
ASVVPQERQQDTRKHYPNYKVIVLNDDFNTFRHVAACLMKYIPNKTSDRAWELTNKVHYVGLAIVWVGPQEQAVLSHQLLLRAGLTMATLETEGS

SEQ ID NO: 4102 - protein, 95 aa, Thermosynechococcus elongatus
ASVVPQERQQDTRKHYPNYKVIVLNDDFNTFRHVAACLMKYIPNKTSDRAWELTNQLHYEGQAIVWVGPQEQAELYHEQLLRAGLTIAPLEPEGS

SEQ ID NO: 4103 - protein, 95 aa, Thermosynechococcus elongatus
ASVVPQERQQDTRKHYPNYKVIVLNDDFNTFRHVAACLMKYIPNKTSDRAWELTNQLHYEGQAIVWVGPQEQAELYHEQLLRAGLTMAPLEPEGS

SEQ ID NO: 4104 - protein, 95 aa, Thermosynechococcus elongatus
ASVVPQERQQDTRKHYPNYKVIVLNDDFNTFRHVAACLMKYIPNKTSDRAWELTNQLHYEGQAIVWVGPQVQAELYHEQLLTAGLTMAPLEPGGS

SEQ ID NO: 4105 - protein, 95 aa, Thermosynechococcus elongatus
ASVVPQERQQDTRKHYPNYKVIVLNDDFNTFRHVAACLMKYIPNKTSDRAWELTNQAHYVGQAIVWVGPQERAELYHEQLLRAGLTMAPLEPEGS

SEQ ID NO: 4106 - protein, 95 aa, Thermosynechococcus elongatus
ASVVPQERQQDTRKHYPNYKVIVLNDDFNTFRHVAACLMKYIPNKTSDRAWELTNQGHYEGQAIVWVGPQEQAELYHEQLLRAGLTMAPLEPEGS

SEQ ID NO: 4107 - protein, 95 aa, Thermosynechococcus elongatus
ASVVPQERQQDTRKHYPNYKVIVLNDDFNTFRHVAACLMKYIPNKTSDRAWELTNQVNYEGQAIVWVGPQEQAELYHEQLLRAGLTMAPLEPEGS

SEQ ID NO: 4108 - protein, 95 aa, Thermosynechococcus elongatus
ASVVPQERQQDTRKHYPNYKVIVLNDDFNTFRHVAACLMKYIPNKTSDRAWELTNQVNYEGQAIVWVGPQVQAELYHEQLLRAGLTMAPLEPGGS

SEQ ID NO: 4109 - protein, 95 aa, Thermosynechococcus elongatus
ASVVPQERQQDTRKHYPNYKVIVLNDDFNTFRHVAACLMKYIPNKTSDRAWELTNQVQYEGQAIVWVGPQEQAELYHEQLLRAGLTMAPLEPEGS

SEQ ID NO: 4110 - protein, 95 aa, Thermosynechococcus elongatus
ASVVPQERQQDTRKHYPNYKVIVLNDDFNTFRHVAACLMKYIPNKTSDRAWELTNQVHDEGQAIVWVGPQEQAELYHEQLLRAGLTMAPLEPEGS

SEQ ID NO: 4111 - protein, 95 aa, Thermosynechococcus elongatus; identical to SEQ ID NO: 4110

SEQ ID NO: 4112 - protein, 95 aa, Thermosynechococcus elongatus
ASVVPQERQQDTRKHYPNYKVIVLNDDFNTFRHVAACLMKYIPNKTSDRAWELTNQVHDEGQAIVWVGPQVQAELYHEQLLRAGLTMAPLEPGGS

SEQ ID NO: 4113 - protein, 58 aa, Thermosynechococcus elongatus; identical to SEQ ID NO: 558

SEQ ID NO: 4114 - protein, 58 aa, Thermosynechococcus elongatus; identical to SEQ ID NO: 558

SEQ ID NO: 4115 - protein, 58 aa, Thermosynechococcus elongatus; identical to SEQ ID NO: 558

SEQ ID NO: 4116 - protein, 95 aa, Thermosynechococcus elongatus
ASVVPQERQQDTRKHYPNYKVIVLNDDFNTFRHVAACLMKYIPNKTSDRAWELTNQVHYKGQAIVWDGPQEQAELNHEQLLRAGLTMAPLEPEGS

SEQ ID NO: 4117 - protein, 95 aa, Thermosynechococcus elongatus
ASVVPQERQQDTRKHYPNYKVIVLNDDFNTFRHVAACLMKYIPNKTSDRAWELTNQVHYKGQAIVWVGPQEQPELNHEQLLRAGLTMAPLEPEGS

SEQ ID NO: 4118 - protein, 95 aa, Thermosynechococcus elongatus; identical to SEQ ID NO: 951

SEQ ID NO: 4119 - protein, 95 aa, Thermosynechococcus elongatus
ASVVPQERQQDTRKHYPNYKVIVLNDDFNTFRHVAACLMKYIPNKTSDRAWELTNQVHYKGRAIVWVGPQEQAELYHEQLLRAGLTMAPLEPEGS

SEQ ID NO: 4120 - protein, 79 aa, Thermosynechococcus elongatus
ASVVPQERQQDTRKHYPNYKVIVLNDDFNTFRHVAACLMKYIPNKTSDRAWELTNQVHYTGQAIVWVGPQEQAELNHEH

SEQ ID NO: 4121 - protein, 95 aa, Thermosynechococcus elongatus
ASVVPQERQQDTRKHYPNYKVIVLNDDFNTFRHVAACLMKYIPNKTSDRAWELTNQVHYTGQAIVWVGPQEQAEFNHEQLLRAGLTMAPLEPEGS

SEQ ID NO: 4122 - protein, 95 aa, Thermosynechococcus elongatus
ASVVPQERQQDTRKHYPNYKVIVLNDDFNTFRHVAACLMKYIPNKTSDRAWELTNQVHYEAQAIVWVGPQEQAELYHEQLLRAGLTMAPLEPEGS

SEQ ID NO: 4123 - protein, 95 aa, Thermosynechococcus elongatus; identical to SEQ ID NO: 4

SEQ ID NO: 4124 - protein, 95 aa, Thermosynechococcus elongatus; identical to SEQ ID NO: 4

SEQ ID NO: 4125 - protein, 95 aa, Thermosynechococcus elongatus
ASVVPQERQQDTRKHYPNYKVIVLNDDFNTFRHVAACLMKYIPNKTSDRAWELTNQVHYEGQDIVWVGPQEQAELYHEQLLRAGLTMAPLETEGS

SEQ ID NO: 4126 - protein, 95 aa, Thermosynechococcus elongatus
ASVVPQERQQDTRKHYPNYKVIVLNDDFNTFRHVAACLMKYIPNKTSDRAWELTNQVHYEGQDIVWVGPQEQAELYHEQLLRAGLTMAPLEPEGS

SEQ ID NO: 4127 - protein, 95 aa, Thermosynechococcus elongatus; identical to SEQ ID NO: 4

SEQ ID NO: 4128 - protein, 95 aa, Thermosynechococcus elongatus; identical to SEQ ID NO: 4

SEQ ID NO: 4129 - protein, 88 aa, Thermosynechococcus elongatus
ASVVPQERQQDTRKHYPNYKVIVLNDDFNTFRHVAACLMKYIPNKTSDRAWELTNQVHYEGQANVWVGPQEQAELYHEQLLRAGLTMV

SEQ ID NO: 4130 - protein, 95 aa, Thermosynechococcus elongatus
ASVVPQERQQDTRKHYPNYKVIVLNDDFNTFRHVAACLMKYIPNKTSDRAWELTNQVHYEGQAIVWVGPQEQAELNHEQLLRAGLTMAPMEPEGS

SEQ ID NO: 4131 - protein, 95 aa, Thermosynechococcus elongatus; identical to SEQ ID NO: 117

SEQ ID NO: 4132 - protein, 95 aa, Thermosynechococcus elongatus; identical to SEQ ID NO: 117

SEQ ID NO: 4133 - protein, 95 aa, Thermosynechococcus elongatus
ASVVPQERQQDTRKHYPNYKVIVLNDDFNTFRHVAACLMKYIPNKTSDRAWELTNQVHYEGQAIVWVGPQEQAELNHEQLLRAGLTLAPLVPEGS

SEQ ID NO: 4134 - protein, 95 aa, Thermosynechococcus elongatus; identical to SEQ ID NO: 4

SEQ ID NO: 4135 - protein, 95 aa, Thermosynechococcus elongatus; identical to SEQ ID NO: 37

SEQ ID NO: 4136 - protein, 95 aa, Thermosynechococcus elongatus
ASVVPQERQQDTRKHYPNYKVIVLNDDFNTFRHVAACLMKYIPNKTSDRAWELTNQVHYEGQAIVRVGPQEQAELYHKQLLRAGLTRAPLEPEGS

SEQ ID NO: 4137 - protein, 95 aa, Thermosynechococcus elongatus; identical to SEQ ID NO: 4

SEQ ID NO: 4138 - protein, 95 aa, Thermosynechococcus elongatus
ASVVPQERQQDTRKHYPNYKVIVLNDDFNTFRHVAACLMKYIPNKTSDRAWELTNQVHYEGQAIVWVAPQEQAELYHEQLLRAGLTMAPLEPEGS

SEQ ID NO: 4139 - protein, 95 aa, Thermosynechococcus elongatus
ASVVPQERQQDTRKHYPNYKVIVLNDDFNTFRHVAACLMKYIPNKTSDRAWELTNQVHYEGQAIVWVGPQEQAESYHEQLLRAGLTMAPLEPEGS

SEQ ID NO: 4140 - protein, 95 aa, Thermosynechococcus elongatus
ASVVPQERQQDTRKHYPNYKVIVLNDDFNTFRHVAACLMKYIPNKTSDRAWELTNQVHYEGQAIVWVGPQEQAELNHEQLLRAGLTMAPLEPGGS

SEQ ID NO: 4141 - protein, 92 aa, Thermosynechococcus elongatus
ASVVPQERQQDTRKHYPNYKVIVLNDDFNTFRHVAACLMKYIPNKTSDRAWELTNQVHYEGQAIVWVGPQEQAELNHEQLLRAGLTMAPLEP

SEQ ID NO: 4142 - protein, 95 aa, Thermosynechococcus elongatus
ASVVPQERQQDTRKHYPNYKVIVLNDDFNTFRHVAACLMKYIPNKTSDRAWELTNQVHYEGQAIVWVGPQEQAELNHEQLLRAGLTMAPFEPEGS

SEQ ID NO: 4143 - protein, 95 aa, Thermosynechococcus elongatus; identical to SEQ ID NO: 2162

SEQ ID NO: 4144 - protein, 95 aa, Thermosynechococcus elongatus
ASVVPQERQQDTRKHYPNYKVIVLNDDFNTFRHVAACLMKYIPNKTSDRAWELTNQVHYEGQAIVWVGPQEQAELYNEQLLRAGLTMAPLEPEGS

SEQ ID NO: 4145 - protein, 80 aa, Thermosynechococcus elongatus
ASVVPQERQQDTRKHYPNYKVIVLNDDFNTFRHVAACLMKYIPNKTSDRAWELTNQVHYEGQAIVWVGPQEQAELYQNNC

SEQ ID NO: 4146 - protein, 95 aa, Thermosynechococcus elongatus
ASVVPQERQQDTRKHYPNYKVIVLNDDFNTFRHVAACLMKYIPNKTSDRAWELTNQVHYEGQAIVWVGPQEQAELYQEQLLRAGLTMAPLEPEGS

SEQ ID NO: 4147 - protein, 95 aa, Thermosynechococcus elongatus
ASVVPQERQQDTRKHYPNYKVIVLNDDFNTFRHVAACLMKYIPNKTSDRAWELTNQVHYEGQAIVWVGPQEQAELYQEPLLRAGLTMAPLEPEGS

SEQ ID NO: 4148 - protein, 95 aa, Thermosynechococcus elongatus
ASVVPQERQQDTRKHYPNYKVIVLNDDFNTFRHVAACLMKYIPNKTSDRAWELTNQVHYEGQAIVWVGPQEQAELYHKQLLRAGLTMAPLEPGGS

SEQ ID NO: 4149 - protein, 95 aa, Thermosynechococcus elongatus
ASVVPQERQQDTRKHYPNYKVIVLNDDFNTFRHVAACLMKYIPNKTSDRAWELTNQVHYEGQAIVWVGPQEQAELYHQQLLRAGLTMAPLEPEGS

SEQ ID NO: 4150 - protein, 95 aa, Thermosynechococcus elongatus; identical to SEQ ID NO: 4

SEQ ID NO: 4151 - protein, 95 aa, Thermosynechococcus elongatus; identical to SEQ ID NO: 466

SEQ ID NO: 4152 - protein, 95 aa, Thermosynechococcus elongatus
ASVVPQERQQDTRKHYPNYKVIVLNDDFNTFRHVAACLMKYIPNKTSDRAWELTNQVHYEGQAIVWVGPQEQAELYHEQSLRAGLTMAPLEPEGS

SEQ ID NO: 4153 - protein, 95 aa, Thermosynechococcus elongatus
ASVVPQERQQDTRKHYPNYKVIVLNDDFNTFRHVAACLMKYIPNKTSDRAWELTNQVHYEGQAIVWVGPQEQAELYHEQWLIAGLTMAPLEPEGS

SEQ ID NO: 4154 - protein, 80 aa, Thermosynechococcus elongatus
ASVVPQERQQDTRKHYPNYKVIVLNDDFNTFRHVAACLMKYIPNKTSDRAWELTNQVHYEGQAIVWVGPQEQAELYHEQL

SEQ ID NO: 4155 - protein, 95 aa, Thermosynechococcus elongatus
ASVVPQERQQDTRKHYPNYKVIVLNDDFNTFRHVAACLMKYIPNKTSDRAWELTNQVHYEGQAIVWVGPQEQAELYHEQLSRAGLTMAPLEPEGS

SEQ ID NO: 4156 - protein, 95 aa, Thermosynechococcus elongatus
ASVVPQERQQDTRKHYPNYKVIVLNDDFNTFRHVAACLMKYIPNKTSDRAWELTNQVHYEGQAIVWVGPQEQAELYHEQLWRAGLTMAPLEPGGS

SEQ ID NO: 4157 - protein, 95 aa, Thermosynechococcus elongatus
ASVVPQERQQDTRKHYPNYKVIVLNDDFNTFRHVAACLMKYIPNKTSDRAWELTNQVHYEGQAIVWVGPQEQAELYHEQLWSAGLTRAPLEPEGS

SEQ ID NO: 4158 - protein, 95 aa, Thermosynechococcus elongatus; identical to SEQ ID NO: 4

SEQ ID NO: 4159 - protein, 95 aa, Thermosynechococcus elongatus
ASVVPQERQQDTRKHYPNYKVIVLNDDFNTFRHVAACLMKYIPNKTSDRAWELTNQVHYEGQAIVWVGPQEQAELYHEQLLRTGLTRAPLEPEGS

SEQ ID NO: 4160 - protein, 95 aa, Thermosynechococcus elongatus; identical to SEQ ID NO: 4

SEQ ID NO: 4161 - protein, 95 aa, Thermosynechococcus elongatus; identical to SEQ ID NO: 4

SEQ ID NO: 4162 - protein, 95 aa, Thermosynechococcus elongatus
ASVVPQERQQDTRKHYPNYKVIVLNDDFNTFRHVAACLMKYIPNKTSDRAWELTNQVHYEGQAIVWVGPQEQAELYHEQLLRASLTMAPLEPEGS

SEQ ID NO: 4163 - protein, 95 aa, Thermosynechococcus elongatus
ASVVPQERQQDTRKHYPNYKVIVLNDDFNTFRHVAACLMKYIPNKTSDRAWELTNQVHYEGQAIVWVGPQEQAELYHEQLLRAGSTMAPLEPEGS

SEQ ID NO: 4164 - protein, 95 aa, Thermosynechococcus elongatus
ASVVPQERQQDTRKHYPNYKVIVLNDDFNTFRHVAACLMKYIPNKTSDRAWELTNQVHYEGQAIVWVGPQEQAELYHEQLLRAGLTTAPLEPEGS

SEQ ID NO: 4165 - protein, 95 aa, Thermosynechococcus elongatus; identical to SEQ ID NO: 212

SEQ ID NO: 4166 - protein, 95 aa, Thermosynechococcus elongatus; identical to SEQ ID NO: 560

SEQ ID NO: 4167 - protein, 95 aa, Thermosynechococcus elongatus; identical to SEQ ID NO: 560

SEQ ID NO: 4168 - protein, 95 aa, Thermosynechococcus elongatus; identical to SEQ ID NO: 4

SEQ ID NO: 4169 - protein, 95 aa, Thermosynechococcus elongatus
ASVVPQERQQDTRKHYPNYKVIVLNDDFNTFRHVAACLMKYIPNKTSDRAWELTNQVHYEGQAIVWVGPQEQAELYHEQLLRAGLTMAQLVPVGS

SEQ ID NO: 4170 - protein, 95 aa, Thermosynechococcus elongatus; identical to SEQ ID NO: 4

SEQ ID NO: 4171 - protein, 95 aa, Thermosynechococcus elongatus
ASVVPQERQQDTRKHYPNYKVIVLNDDFNTFRHVAACLMKYIPNKTSDRAWELTNQVHYEGQAIVWVGPQEQAELYHEQLLRAGLTMAPLELEGS

SEQ ID NO: 4172 - protein, 95 aa, Thermosynechococcus elongatus
ASVVPQERQQDTRKHYPNYKVIVLNDDFNTFRHVAACLMKYIPNKTSDRAWELTNQVHYEGQAIVWVGPQEQAELYHEQLLRAGLTMAPLESEGS

SEQ ID NO: 4173 - protein, 95 aa, Thermosynechococcus elongatus; identical to SEQ ID NO: 31

SEQ ID NO: 4174 - protein, 95 aa, Thermosynechococcus elongatus; identical to SEQ ID NO: 4

SEQ ID NO: 4175 - protein, 95 aa, Thermosynechococcus elongatus; identical to SEQ ID NO: 31

SEQ ID NO: 4176 - protein, 95 aa, Thermosynechococcus elongatus; identical to SEQ ID NO: 4

SEQ ID NO: 4177 - protein, 95 aa, Thermosynechococcus elongatus
ASVVPQERQQDTRKHYPNYKVIVLNDDFNTFRHVAACLMKYIPNKTSDRAWELTNQVHYEGQAIVWVGPQEQAELYHEQLLRAGLTMVPLERGGS

SEQ ID NO: 4178 - protein, 95 aa, Thermosynechococcus elongatus
ASVVPQERQQDTRKHYPNYKVIVLNDDFNTFRHVAACLMKYIPNKTSDRAWELTNQVHYEGQAIVWVGPQEQAELYHEQLLRAGLTMSPLEPEGS

SEQ ID NO: 4179 - protein, 95 aa, Thermosynechococcus elongatus; identical to SEQ ID NO: 212

SEQ ID NO: 4180 - protein, 95 aa, Thermosynechococcus elongatus
ASVVPQERQQDTRKHYPNYKVIVLNDDFNTFRHVAACLMKYIPNKTSDRAWELTNQVHYEGQAIVWVGPQEQAELYHEQLLRAGLIMAPLEPEGS

SEQ ID NO: 4181 - protein, 83 aa, Thermosynechococcus elongatus
ASVVPQERQQDTRKHYPNYKVIVLNDDFNTFRHVAACLMKYIPNKTSDRAWELTNQVHYEGQAIVWVGPQEQAELYHEQLLRA

SEQ ID NO: 4182 - protein, 95 aa, Thermosynechococcus elongatus; identical to SEQ ID NO: 467

SEQ ID NO: 4183 - protein, 95 aa, Thermosynechococcus elongatus
ASVVPQERQQDTRKHYPNYKVIVLNDDFNTFRHVAACLMKYIPNKTSDRAWELTNQVHYEGQAIVWVGPQEQAELYHEQLLGAGLTMAPLEPEGS

SEQ ID NO: 4184 - protein, 81 aa, Thermosynechococcus elongatus
ASVVPQERQQDTRKHYPNYKVIVLNDDFNTFRHVAACLMKYIPNKTSDRAWELTNQVHYEGQAIVWVGPQEQAELYHEQLL

SEQ ID NO: 4185 - protein, 95 aa, Thermosynechococcus elongatus
ASVVPQERQQDTRKHYPNYKVIVLNDDFNTFRHVAACLMKYIPNKTSDRAWELTNQVHYEGQAIVWVGPQEQAELYHEQFLRAGLTMAPLEPEGS

SEQ ID NO: 4186 - protein, 95 aa, Thermosynechococcus elongatus; identical to SEQ ID NO: 1487

SEQ ID NO: 4187 - protein, 95 aa, Thermosynechococcus elongatus
ASVVPQERQQDTRKHYPNYKVIVLNDDFNTFRHVAACLMKYIPNKTSDRAWELTNQVHYEGQAIVWVGPQEQAELYHEHWLRAGLTMAPLEPEGS

SEQ ID NO: 4188 - protein, 95 aa, Thermosynechococcus elongatus
ASVVPQERQQDTRKHYPNYKVIVLNDDFNTFRHVAACLMKYIPNKTSDRAWELTNQVHYEGQAIVWVGPQEQAELYHEHLLRAGLTMAPLEPGGS

SEQ ID NO: 4189 - protein, 95 aa, Thermosynechococcus elongatus; identical to SEQ ID NO: 4

SEQ ID NO: 4190 - protein, 79 aa, Thermosynechococcus elongatus
ASVVPQERQQDTRKHYPNYKVIVLNDDFNTFRHVAACLMKYIPNKTSDRAWELTNQVHYEGQAIVWVGPQEQAELYHEP

SEQ ID NO: 4191 - protein, 95 aa, Thermosynechococcus elongatus
ASVVPQERQQDTRKHYPNYKVIVLNDDFNTFRHVAACLMKYIPNKTSDRAWELTNQVHYEGQAIVWVGPQEQAELYHERLLRAGLTMAPLEPEGS

SEQ ID NO: 4192 - protein, 95 aa, Thermosynechococcus elongatus; identical to SEQ ID NO: 4191

SEQ ID NO: 4193 - protein, 95 aa, Thermosynechococcus elongatus
ASVVPQERQQDTRKHYPNYKVIVLNDDFNTFRHVAACLMKYIPNKTSDRAWELTNQVHYEGQAIVWVGPQEQAELYHDQLLRAGLTMAPLEPEGS

SEQ ID NO: 4194 - protein, 95 aa, Thermosynechococcus elongatus; identical to SEQ ID NO: 4193

SEQ ID NO: 4195 - protein, 95 aa, Thermosynechococcus elongatus
ASVVPQERQQDTRKHYPNYKVIVLNDDFNTFRHVAACLMKYIPNKTSDRAWELTNQVHYEGQAIVWVGPQEQAELYHDHLLRAGLTMAPLDPEGS

SEQ ID NO: 4196 - protein, 95 aa, Thermosynechococcus elongatus
ASVVPQERQQDTRKHYPNYKVIVLNDDFNTFRHVAACLMKYIPNKTSDRAWELTNQVHYEGQAIVWVGPQEQAELYHAQLLSAGLTMAPLEPVGS

SEQ ID NO: 4197 - protein, 95 aa, Thermosynechococcus elongatus
ASVVPQERQQDTRKHYPNYKVIVLNDDFNTFRHVAACLMKYIPNKTSDRAWELTNQVHYEGQAIVWVGPQEQAELYHGQLLRAGLTMAPLEPEGS

SEQ ID NO: 4198 - protein, 95 aa, Thermosynechococcus elongatus
ASVVPQERQQDTRKHYPNYKVIVLNDDFNTFRHVAACLMKYIPNKTSDRAWELTNQVHYEGQAIVWVGPQEQAELYQEQLLRACLTMAPLEPEGS

SEQ ID NO: 4199 - protein, 95 aa, Thermosynechococcus elongatus
ASVVPQERQQDTRKHYPNYKVIVLNDDFNTFRHVAACLMKYIPNKTSDRAWELTNQVHYEGQAIVWVGPQEQAELYQELLLRAGLTMAPLEPEGS

SEQ ID NO: 4200 - protein, 95 aa, Thermosynechococcus elongatus; identical to SEQ ID NO: 4

SEQ ID NO: 4201 - protein, 95 aa, Thermosynechococcus elongatus
ASVVPQERQQDTRKHYPNYKVIVLNDDFNTFRHVAACLMKYIPNKTSDRAWELTNQVHYEGQAIVWVGPQEQAELYPEHLLRAGLTMAPLEPEGS

SEQ ID NO: 4202 - protein, 95 aa, Thermosynechococcus elongatus
ASVVPQERQQDTRKHYPNYKVIVLNDDFNTFRHVAACLMKYIPNKTSDRAWELTNQVHYEGQAIVWVGPQEQAELYREQLLRAGLTRAPLEPEGS

SEQ ID NO: 4203 - protein, 95 aa, Thermosynechococcus elongatus
ASVVPQERQQDTRKHYPNYKVIVLNDDFNTFRHVAACLMKYIPNKTSDRAWELTNQVHYEGQAIVWVGPQEQAELYREQLLRAGLTMAPLEPEGS

SEQ ID NO: 4204 - protein, 75 aa, Thermosynechococcus elongatus
ASVVPQERQQDTRKHYPNYKVIVLNDDFNTFRHVAACLMKYIPNKTSDRAWELTNQVHYEGQAIVWVGPQEQAEL

SEQ ID NO: 4205 - protein, 95 aa, Thermosynechococcus elongatus; identical to SEQ ID NO: 4

SEQ ID NO: 4206 - protein, 95 aa, Thermosynechococcus elongatus
ASVVPQERQQDTRKHYPNYKVIVLNDDFNTFRHVAACLMKYIPNKTSDRAWELTNQVHYEGQAIVWVGPQEQAELCHEQLLRAGLTMAPLEPEGS

SEQ ID NO: 4207 - protein, 95 aa, Thermosynechococcus elongatus; identical to SEQ ID NO: 4

SEQ ID NO: 4208 - protein, 95 aa, Thermosynechococcus elongatus; identical to SEQ ID NO: 4

SEQ ID NO: 4209 - protein, 95 aa, Thermosynechococcus elongatus
ASVVPQERQQDTRKHYPNYKVIVLNDDFNTFRHVAACLMKYIPNKTSDRAWELTNQVHYEGQAIVWVGPQEQAGLYHEQLLRAGLTMAPLEPEGS

SEQ ID NO: 4210 - protein, 95 aa, Thermosynechococcus elongatus
ASVVPQERQQDTRKHYPNYKVIVLNDDFNTFRHVAACLMKYIPNKTSDRAWELTNQVHYEGQAIVWVGPQEHAELYHEQLLRAGLTMAPLEPEGS

SEQ ID NO: 4211 - protein, 95 aa, Thermosynechococcus elongatus
ASVVPQERQQDTRKHYPNYKVIVLNDDFNTFRHVAACLMKYIPNKTSDRAWELTNQVHYEGQAIVWVGPQELAELYHEQLLRAGLTMAPLEPEGS

SEQ ID NO: 4212 - protein, 95 aa, Thermosynechococcus elongatus
ASVVPQERQQDTRKHYPNYKVIVLNDDFNTFRHVAACLMKYIPNKTSDRAWELTNQVHYEGQAIVWVGPQELAELYHEQLLRAGLTLAPLEPEGS

SEQ ID NO: 4213 - protein, 95 aa, Thermosynechococcus elongatus
ASVVPQERQQDTRKHYPNYKVIVLNDDFNTFRHVAACLMKYIPNKTSDRAWELTNQVHYEGQAIVWVGPQDQAELYHEHLLRAGLTMAPLEPEGS

SEQ ID NO: 4214 - protein, 95 aa, Thermosynechococcus elongatus
ASVVPQERQQDTRKHYPNYKVIVLNDDFNTFRHVAACLMKYIPNKTSDRAWELTNQVHYEGQAIVWVGPQDQAELYHEQLLRAGLTMAPLEPEGS

SEQ ID NO: 4215 - protein, 95 aa, Thermosynechococcus elongatus
ASVVPQERQQDTRKHYPNYKVIVLNDDFNTFRHVAACLMKYIPNKTSDRAWELTNQVHYEGQAIVWVGPQAQAELNHEQLLRAGLTMAPLEPEGS

SEQ ID NO: 4216 - protein, 95 aa, Thermosynechococcus elongatus
ASVVPQERQQDTRKHYPNYKVIVLNDDFNTFRHVAACLMKYIPNKTSDRAWELTNQVHYEGQAIVWVGPQGQAELYHEQLLRAGLTMAPLEPEGS

SEQ ID NO: 4217 - protein, 95 aa, Thermosynechococcus elongatus
ASVVPQERQQDTRKHYPNYKVIVLNDDFNTFRHVAACLMKYIPNKTSDRAWELTNQVHYEGQAIVWVGPQVQAELYHQQLLRAGLTMAPLEPGGS

SEQ ID NO: 4218 - protein, 95 aa, Thermosynechococcus elongatus; identical to SEQ ID NO: 37

SEQ ID NO: 4219 - protein, 95 aa, Thermosynechococcus elongatus
ASVVPQERQQDTRKHYPNYKVIVLNDDFNTFRHVAACLMKYIPNKTSDRAWELTNQVHYEGQAIVWVGPQVQAELYHEQLWRAGLTMAPLEPGGS

SEQ ID NO: 4220 - protein, 95 aa, Thermosynechococcus elongatus
ASVVPQERQQDTRKHYPNYKVIVLNDDFNTFRHVAACLMKYIPNKTSDRAWELTNQVHYEGQAIVWVGPQVQAELYHEQLLRAGLTRAPLEPGGS

SEQ ID NO: 4221 - protein, 95 aa, Thermosynechococcus elongatus
ASVVPQERQQDTRKHYPNYKVIVLNDDFNTFRHVAACLMKYIPNKTSDRAWELTNQVHYEGQAIVWVGPQVQAELYHEQLLRAGLTMAPLVPGGS

SEQ ID NO: 4222 - protein, 95 aa, Thermosynechococcus elongatus
ASVVPQERQQDTRKHYPNYKVIVLNDDFNTFRHVAACLMKYIPNKTSDRAWELTNQVHYEGQAIVWVGPQVQAELYHEQLLRAGLTMSPLEPGGS

SEQ ID NO: 4223 - protein, 95 aa, Thermosynechococcus elongatus
ASVVPQERQQDTRKHYPNYKVIVLNDDFNTFRHVAACLMKYIPNKTSDRAWELTNQVHYEGQAIVWVGPQVQAELYHEQLLRAGLAMAPLEPGGS

SEQ ID NO: 4224 - protein, 77 aa, Thermosynechococcus elongatus
ASVVPQERQQDTRKHYPNYKVIVLNDDFNTFRHVAACLMKYIPNKTSDRAWELTNQVHYEGQAIVWVGPQVQAELYH

SEQ ID NO: 4225 - protein, 95 aa, Thermosynechococcus elongatus
ASVVPQERQQDTRKHYPNYKVIVLNDDFNTFRHVAACLMKYIPNKTSDRAWELTNQVHYEGQAIVWVGPQVQAELYREQLLRAGLTMAPLEPGGS

SEQ ID NO: 4226 - protein, 70 aa, Thermosynechococcus elongatus; identical to SEQ ID NO: 1505

SEQ ID NO: 4227 - protein, 95 aa, Thermosynechococcus elongatus
ASVVPQERQQDTRKHYPNYKVIVLNDDFNTFRHVAACLMKYIPNKTSDRAWELTNQVHYEGQAIVWVGPHEQAELYHEQLLRAGLTMAPLEPEGS

SEQ ID NO: 4228 - protein, 95 aa, Thermosynechococcus elongatus
ASVVPQERQQDTRKHYPNYKVIVLNDDFNTFRHVAACLMKYIPNKTSDRAWELTNQVHYEGQAIVWVGPREQAELYHEQLLRAGLTMAPLEPEGS

SEQ ID NO: 4229 - protein, 95 aa, Thermosynechococcus elongatus; identical to SEQ ID NO: 4

SEQ ID NO: 4230 - protein, 95 aa, Thermosynechococcus elongatus
ASVVPQERQQDTRKHYPNYKVIVLNDDFNTFRHVAACLMKYIPNKTSDRAWELTNQVHYEGQAIVWVGLQEQAELYHEQLLRAGLTMAPLEPEGS

SEQ ID NO: 4231 - protein, 95 aa, Thermosynechococcus elongatus; identical to SEQ ID NO: 4230

SEQ ID NO: 4232 - protein, 95 aa, Thermosynechococcus elongatus; identical to SEQ ID NO: 1482

SEQ ID NO: 4233 - protein, 70 aa, Thermosynechococcus elongatus
ASVVPQERQQDTRKHYPNYKVIVLNDDFNTFRHVAACLMKYIPNKTSDRAWELTNQVHYEGQAIVWVCPQ

SEQ ID NO: 4234 - protein, 95 aa, Thermosynechococcus elongatus
ASVVPQERQQDTRKHYPNYKVIVLNDDFNTFRHVAACLMKYIPNKTSDRAWELTNQVHYEGQAIVCVGPQEQAELYHEQLLRAGLTMAQLEPEGS

SEQ ID NO: 4235 - protein, 95 aa, Thermosynechococcus elongatus
ASVVPQERQQDTRKHYPNYKVIVLNDDFNTFRHVAACLMKYIPNKTSDRAWELTNQVHYEGQAIVCVGPQEQAELYHEQLLRAGLTMAPLEQEGS

SEQ ID NO: 4236 - protein, 95 aa, Thermosynechococcus elongatus
ASVVPQERQQDTRKHYPNYKVIVLNDDFNTFRHVAACLMKYIPNKTSDRAWELTNQVHYEGQSIVWVGPQEQAELYHEQLLRAGLTMAQLVPEGS

SEQ ID NO: 4237 - protein, 95 aa, Thermosynechococcus elongatus
ASVVPQERQQDTRKHYPNYKVIVLNDDFNTFRHVAACLMKYIPNKTSDRAWELTNQVHYEGQSIVWVGPQEQAELYHEQLLRAGLTIAPLEPEGS

SEQ ID NO: 4238 - protein, 95 aa, Thermosynechococcus elongatus
ASVVPQERQQDTRKHYPNYKVIVLNDDFNTFRHVAACLMKYIPNKTSDRAWELTNQVHYEGQSIVWVGPQEQAELFHEQLLRAGLTLAPLEPEGS

SEQ ID NO: 4239 - protein, 95 aa, Thermosynechococcus elongatus; identical to SEQ ID NO: 4

SEQ ID NO: 4240 - protein, 95 aa, Thermosynechococcus elongatus; identical to SEQ ID NO: 31

SEQ ID NO: 4241 - protein, 95 aa, Thermosynechococcus elongatus
ASVVPQERQQDTRKHYPNYKVIVLNDDFNTFRHVAACLMKYIPNKTSDRAWELTNQVHYEGRAIVWVGPQEQAELYHEQLWRAGLTMAPLEPEGS

SEQ ID NO: 4242 - protein, 95 aa, Thermosynechococcus elongatus
ASVVPQERQQDTRKHYPNYKVIVLNDDFNTFRHVAACLMKYIPNKTSDRAWELTNQVHYEGRAIVWVGPQEQAELYHELLLRAGLTMAPLEPEGS

SEQ ID NO: 4243 - protein, 95 aa, Thermosynechococcus elongatus
ASVVPQERQQDTRKHYPNYKVIVLNDDFNTFRHVAACLMKYIPNKTSDRAWELTNQVHYEGLAIVWVGPQEQAELYHEQLLRAGLTMAQLEPEGS

SEQ ID NO: 4244 - protein, 95 aa, Thermosynechococcus elongatus
ASVVPQERQQDTRKHYPNYKVIVLNDDFNTFRHVAACLMKYIPNKTSDRAWELTNQVHYEGLAIVWVGPQEQAELYHEQLLRAGLTMARLEPEGS

SEQ ID NO: 4245 - protein, 77 aa, Thermosynechococcus elongatus
ASVVPQERQQDTRKHYPNYKVIVLNDDFNTFRHVAACLMKYIPNKTSDRAWELTNQVHYEGLAIVWVGPQEQADLYH

SEQ ID NO: 4246 - protein, 90 aa, Thermosynechococcus elongatus
ASVVPQERQQDTRKHYPNYKVIVLNDDFNTFRHVAACLMKYIPNKTSDRAWELTNQVHYEGLAIVWVGPQEQAVLYHEQLLRAGLTMAPL

SEQ ID NO: 4247 - protein, 95 aa, Thermosynechococcus elongatus
ASVVPQERQQDTRKHYPNYKVIVLNDDFNTFRHVAACLMKYIPNKTSDRAWELTNQVHYEGLAIVWVGPQVQAELYHEPLLRAGLTMAPLEPGGS

SEQ ID NO: 4248 - protein, 95 aa, Thermosynechococcus elongatus
ASVVPQERQQDTRKHYPNYKVIVLNDDFNTFRHVAACLMKYIPNKTSDRAWELTNQVHYEGLAIVWVGPQEQAELYHEHLLRAGLTRAPLDPEGS

SEQ ID NO: 4249 - protein, 95 aa, Thermosynechococcus elongatus
ASVVPQERQQDTRKHYPNYKVIVLNDDFNTFRHVAACLMKYIPNKTSDRAWELTNQVHYESQAIVWVGPQVQAELYHEQLLRAGLTMAPLEPGGS

SEQ ID NO: 4250 - protein, 95 aa, Thermosynechococcus elongatus
ASVVPQERQQDTRKHYPNYKVIVLNDDFNTFRHVAACLMKYIPNKTSDRAWELTNQVHYECQAIVWVGPQEQAELYQEQLLRAGLTMAPLEPEGS

SEQ ID NO: 4251 - protein, 95 aa, Thermosynechococcus elongatus
ASVVPQERQQDTRKHYPNYKVIVLNDDFNTFRHVAACLMKYIPNKTSDRAWELTNQVHYECQAIVWVGPQEQAELYHEQLLRAGLTMAQLEPEGS

SEQ ID NO: 4252 - protein, 90 aa, Thermosynechococcus elongatus
ASVVPQERQQDTRKHYPNYKVIVLNDDFNTFRHVAACLMKYIPNKTSDRAWELTNQVHYECQAIVWVGPQEQAELYHEQLLRGGLTMAPL

SEQ ID NO: 4253 - protein, 95 aa, Thermosynechococcus elongatus
ASVVPQERQQDTRKHYPNYKVIVLNDDFNTFRHVAACLMKYIPNKTSDRAWELTNQVHYDGQAIVWVGPQVQAELYHEQLLRAGLTMAPLEPGGS

SEQ ID NO: 4254 - protein, 95 aa, Thermosynechococcus elongatus; identical to SEQ ID NO: 964

SEQ ID NO: 4255 - protein, 95 aa, Thermosynechococcus elongatus
ASVVPQERQQDTRKHYPNYKVIVLNDDFNTFRHVAACLMKYIPNKTSDRAWELTNQVHYDCQAIVWVGPQEQAELYHEQLLRAGLTMAPLEPEGS

SEQ ID NO: 4256 - protein, 95 aa, Thermosynechococcus elongatus
ASVVPQERQQDTRKHYPNYKVIVLNDDFNTFRHVAACLMKYIPNKTSDRAWELTNQVHYAGQAIVWVGPQEQAELYHEQLLRAGLTMAPLEPEGS

SEQ ID NO: 4257 - protein, 95 aa, Thermosynechococcus elongatus
ASVVPQERQQDTRKHYPNYKVIVLNDDFNTFRHVAACLMKYIPNKTSDRAWELTNQVHYGGRAIVWVGPQEQAELNHEQLLRAGLTMAPLEPEGS

SEQ ID NO: 4258 - protein, 95 aa, Thermosynechococcus elongatus
ASVVPQERQQDTRKHYPNYKVIVLNDDFNTFRHVAACLMKYIPNKTSDRAWELTNQVHYGGRAIVWVGPQEQAELYHKQLLRAGLTMAPLEPEGS

SEQ ID NO: 4259 - protein, 95 aa, Thermosynechococcus elongatus
ASVVPQERQQDTRKHYPNYKVIVLNDDFNTFRHVAACLMKYIPNKTSDRAWELTNQVHYGGRAIVWVGPQEQAELYHEQSLRAGLTMAPLEPEGS

SEQ ID NO: 4260 - protein, 95 aa, Thermosynechococcus elongatus
ASVVPQERQQDTRKHYPNYKVIVLNDDFNTFRHVAACLMKYIPNKTSDRAWELTNQVHYGGRAIVWVGPQEQAELYHEQWLRAGLTMAPLEPEGS

SEQ ID NO: 4261 - protein, 93 aa, Thermosynechococcus elongatus
ASVVPQERQQDTRKHYPNYKVIVLNDDFNTFRHVAACLMKYIPNKTSDRAWELTNQVHYGGRAIVWVGPQEQAELYHEQLLRAGLTMAWNQKD

SEQ ID NO: 4262 - protein, 95 aa, Thermosynechococcus elongatus
ASVVPQERQQDTRKHYPNYKVIVLNDDFNTFRHVAACLMKYIPNKTSDRAWELTNQVHYGGRAIVWVGPQEQAELYHEQLLRAGLTMAPLEPGGS

SEQ ID NO: 4263 - protein, 95 aa, Thermosynechococcus elongatus
ASVVPQERQQDTRKHYPNYKVIVLNDDFNTFRHVAACLMKYIPNKTSDRAWELTNQVHYGGRAIVWVGPQEQAELYHEQLLRAGLTMAPLEPVGS

SEQ ID NO: 4264 - protein, 95 aa, Thermosynechococcus elongatus; identical to SEQ ID NO: 4262

SEQ ID NO: 4265 - protein, 95 aa, Thermosynechococcus elongatus; identical to SEQ ID NO: 51

SEQ ID NO: 4266 - protein, 95 aa, Thermosynechococcus elongatus
ASVVPQERQQDTRKHYPNYKVIVLNDDFNTFRHVAACLMKYIPNKTSDRAWELTNQVHYGGRAIVWVGPQEQAELYLEQLLRAGLTMAPLEPEGS

SEQ ID NO: 4267 - protein, 95 aa, Thermosynechococcus elongatus; identical to SEQ ID NO: 51

SEQ ID NO: 4268 - protein, 95 aa, Thermosynechococcus elongatus
ASVVPQERQQDTRKHYPNYKVIVLNDDFNTFRHVAACLMKYIPNKTSDRAWELTNQVHYGGRAIVWVGPQEQAEFYHEQLLRAGLTMAPLEPEGS

SEQ ID NO: 4269 - protein, 95 aa, Thermosynechococcus elongatus; identical to SEQ ID NO: 51

SEQ ID NO: 4270 - protein, 95 aa, Thermosynechococcus elongatus
ASVVPQERQQDTRKHYPNYKVIVLNDDFNTFRHVAACLMKYIPNKTSDRAWELTNQVHYGCRAIVWVGPQEQAELYHEQLLRAGLTMAPLEPEGS

SEQ ID NO: 4271 - protein, 95 aa, Thermosynechococcus elongatus
ASVVPQERQQDTRKHYPNYKVIVLNDDFNTFRHVAACLMKYIPNKTSDRAWELTNQVHYVGQAIVWVGPQEQAELNHEQLLRAGLTMAPLEPEGS

SEQ ID NO: 4272 - protein, 95 aa, Thermosynechococcus elongatus; identical to SEQ ID NO: 965

SEQ ID NO: 4273 - protein, 95 aa, Thermosynechococcus elongatus
ASVVPQERQQDTRKHYPNYKVIVLNDDFNTFRHVAACLMKYIPNKTSDRAWELTNQVHYVGQAIVWVGPQEQAELYHEQLLRAGLTMAPLEPGGS

SEQ ID NO: 4274 - protein, 95 aa, Thermosynechococcus elongatus
ASVVPQERQQDTRKHYPNYKVIVLNDDFNTFRHVAACLMKYIPNKTSDRAWELTNQVHYVGQAIVWVGPQEQAELYHEQLLRAGLSMAPLEPEGS

SEQ ID NO: 4275 - protein, 95 aa, Thermosynechococcus elongatus
ASVVPQERQQDTRKHYPNYKVIVLNDDFNTFRHVAACLMKYIPNKTSDRAWELTNQVHYVGQAIVWVGPQEQAELYHEPLLRAGLTMAPLEPEGS

SEQ ID NO: 4276 - protein, 95 aa, Thermosynechococcus elongatus; identical to SEQ ID NO: 102

SEQ ID NO: 4277 - protein, 95 aa, Thermosynechococcus elongatus
ASVVPQERQQDTRKHYPNYKVIVLNDDFNTFRHVAACLMKYIPNKTSDRAWELTNQVHYVGQAIVWVCPQERAELYHEQLLRAGLTMAPLEPEGS

SEQ ID NO: 4278 - protein, 95 aa, Thermosynechococcus elongatus
ASVVPQERQQDTRKHYPNYKVIVLNDDFNTFRHVAACLMKYIPNKTSDRAWELTNQVHYVGLAIVWVGPQERAELYHEQLLRAGLTMAPLEPEGS

SEQ ID NO: 4279 - protein, 95 aa, Thermosynechococcus elongatus
ASVVPQERQQDTRKHYPNYKVIVLNDDFNTFRHVAACLMKYIPNKTSDRAWELTNQVHYVGLAIVWVGPQERAELYHEHLLRAGLTMAPLEPEGS

SEQ ID NO: 4280 - protein, 59 aa, Thermosynechococcus elongatus
ASVVPQERQQDTRKHYPNYKVIVLNDDFNTFRHVAACLMKYIPNKTSDRAWELTNQVHY

SEQ ID NO: 4281 - protein, 95 aa, Thermosynechococcus elongatus; identical to SEQ ID NO: 4

SEQ ID NO: 4282 - protein, 95 aa, Thermosynechococcus elongatus
ASVVPQERQQDTRKHYPNYKVIVLNDDFNTFRHVAACLMKYIPNKTSDRAWELTNQVHCEGQAIVWVGPQEQAELYHEQLLRAGLTMAPLEPEGS

SEQ ID NO: 4283 - protein, 95 aa, Thermosynechococcus elongatus
ASVVPQERQQDTRKHYPNYKVIVLNDDFNTFRHVAACLMKYIPNKTSDRAWELTNQVHCGGRAIVWVGPQEQAELYHEQLLRAGLTMAPLEPEGS

SEQ ID NO: 4284 - protein, 95 aa, Thermosynechococcus elongatus
ASVVPQERQQDTRKHYPNYKVIVLNDDFNTFRHVAACLMKYIPNKTSDRAWELTNQVHFEGQAIVWVGPQEQAELYHEQLLRAGLSMATLEPEGS

SEQ ID NO: 4285 - protein, 95 aa, Thermosynechococcus elongatus
ASVVPQERQQDTRKHYPNYKVIVLNDDFNTFRHVAACLMKYIPNKTSDRAWELTNQVHFEGQAIVWVGPQEQAELYHEQLLRAGLSMAPLEPEGS

SEQ ID NO: 4286 - protein, 95 aa, Thermosynechococcus elongatus
ASVVPQERQQDTRKHYPNYKVIVLNDDFNTFRHVAACLMKYIPNKTSDRAWELTNQVHFEGQAIVWVGPQEQAELYHEHLLRAGLTMAPLEPEGS

SEQ ID NO: 4287 - protein, 95 aa, Thermosynechococcus elongatus
ASVVPQERQQDTRKHYPNYKVIVLNDDFNTFRHVAACLMKYIPNKTSDRAWELTNQVHFEGQAIVWVGPQEQAELYHDQLLRAGLTMAPLEPEGS

SEQ ID NO: 4288 - protein, 95 aa, Thermosynechococcus elongatus
ASVVPQERQQDTRKHYPNYKVIVLNDDFNTFRHVAACLMKYIPNKTSDRAWELTNQVHFEGQAIFWVGPQEQAELYHEQLLRSGLTMAPLETEGS

SEQ ID NO: 4289 - protein, 95 aa, Thermosynechococcus elongatus
ASVVPQERQQDTRKHYPNYKVIVLNDDFNTFRHVAACLMKYIPNKTSDRAWELTNQVHFEGLAIVWVGPQEQAELYHEHLLRAGLTLAPLEPEGS

SEQ ID NO: 4290 - protein, 95 aa, Thermosynechococcus elongatus
ASVVPQERQQDTRKHYPNYKVIVLNDDFNTFRHVAACLMKYIPNKTSDRAWELTNQVLYEGQSIVWVCPQEQAELYHEQLLRAGLTMAPLEAEGS

SEQ ID NO: 4291 - protein, 95 aa, Thermosynechococcus elongatus
ASVVPQERQQDTRKHYPNYKVIVLNDDFNTFRHVAACLMKYIPNKTSDRAWELTNQVLYVGLAIVWVGPQEQAELYHEQLLRAGLTMAPLEPEGS

SEQ ID NO: 4292 - protein, 95 aa, Thermosynechococcus elongatus
ASVVPQERQQDTRKHYPNYKVIVLNDDFNTFRHVAACLMKYIPNKTSDRAWELTNQVLSEGLAIVWVGPQEQAVLYHEQLLRAGLTMAPLEPEGS

SEQ ID NO: 4293 - protein, 95 aa, Thermosynechococcus elongatus
ASVVPQERQQDTRKHYPNYKVIVLNDDFNTFRHVAACLMKYIPNKTSDRAWELTNQFHYEGQAIVWVGPLEQAEFFHVQLLRAGLSLAPLVPEGS

SEQ ID NO: 4294 - protein, 95 aa, Thermosynechococcus elongatus
ASVVPQERQQDTRKHYPNYKVIVLNDDFNTFRHVAACLMKYIPNKTSDRAWELTNHVHYEGQAIVWVGPQEQAELYHEQLLRAGLTMAPLEPEGS

SEQ ID NO: 4295 - protein, 95 aa, Thermosynechococcus elongatus; identical to SEQ ID NO: 4294

SEQ ID NO: 4296 - protein, 95 aa, Thermosynechococcus elongatus
ASVVPQERQQDTRKHYPNYKVIVLNDDFNTFRHVAACLMKYIPNKTSDRAWELTNLVHYEGQAIVWVGPQEQAELYHEQLLRAGLTMAPLEPEGS

SEQ ID NO: 4297 - protein, 95 aa, Thermosynechococcus elongatus; identical to SEQ ID NO: 4

SEQ ID NO: 4298 - protein, 95 aa, Thermosynechococcus elongatus
ASVVPQERQQDTRKHYPNYKVIVLNDDFNTFRHVAACLMKYIPNKTSDRAWELTIQVHYEGQAIVWVGPQEQAELYHEQLLRAGLTMAPLEPEGS

SEQ ID NO: 4299 - protein, 95 aa, Thermosynechococcus elongatus
ASVVPQERQQDTRKHYPNYKVIVLNDDFNTFRHVAACLMKYIPNKTSDRAWELTIQVHYGGRAIVWVGPQEQAVLYHEQLLRAGLTMARLEPVGS

SEQ ID NO: 4300 - protein, 95 aa, Thermosynechococcus elongatus
ASVVPQERQQDTRKHYPNYKVIVLNDDFNTFRHVAACLMKYIPNKTSDRAWELTDQVHYEGQAIVWVGPQEQAELYHEQLLRAGLTMAPLEPEGS

SEQ ID NO: 4301 - protein, 95 aa, Thermosynechococcus elongatus
ASVVPQERQQDTRKHYPNYKVIVLNDDFNTFRHVAACLMKYIPNKTSDRAWELSNQVHYEGQAIVWVGPQEQAELYHEQLLRAGLTMAPLEPEGS

SEQ ID NO: 4302 - protein, 95 aa, Thermosynechococcus elongatus
ASVVPQERQQDTRKHYPNYKVIVLNDDFNTFRHVAACLMKYIPNKTSDRAWELSNQVHYEGQAIVWVGPQEQAELYHEQLLRAGLTMAPLEPGGS

SEQ ID NO: 4303 - protein, 95 aa, Thermosynechococcus elongatus
ASVVPQERQQDTRKHYPNYKVIVLNDDFNTFRHVAACLMKYIPNKTSDRAWELINQVHYEGQAIVWVGPQEQAELNHEQLLRAGLTMAPLEPEGS

SEQ ID NO: 4304 - protein, 95 aa, Thermosynechococcus elongatus
ASVVPQERQQDTRKHYPNYKVIVLNDDFNTFRHVAACLMKYIPNKTSDRAWELANQFHYEGQAIVWVGPQEQAELNHEQLLRAGLTMAPLEPEGS

SEQ ID NO: 4305 - protein, 77 aa, Thermosynechococcus elongatus
ASVVPQERQQDTRKHYPNYKVIVLNDDFNTFRHVAACLMKYIPNKTSDRAWDLTNQVHYEGQAIVWVGPQEQAELYH

SEQ ID NO: 4306 - protein, 95 aa, Thermosynechococcus elongatus
ASVVPQERQQDTRKHYPNYKVIVLNDDFNTFRHVAACLMKYIPNKTSDRAWVLTNQVHYEGQAIVCVGPQEQAELYHEQLLRAGLTMAPLEPEGS

SEQ ID NO: 4307 - protein, 51 aa, Thermosynechococcus elongatus; identical to SEQ ID NO: 970

SEQ ID NO: 4308 - protein, 95 aa, Thermosynechococcus elongatus
ASVVPQERQQDTRKHYPNYKVIVLNDDFNTFRHVAACLMKYIPNKTSDRACELTNQVHYKGQAIVWVGPQEQAELNHEQLLRAGLTMAPLEPEGS

SEQ ID NO: 4309 - protein, 95 aa, Thermosynechococcus elongatus; identical to SEQ ID NO: 1514

SEQ ID NO: 4310 - protein, 95 aa, Thermosynechococcus elongatus
ASVVPQERQQDTRKHYPNYKVIVLNDDFNTFRHVAACLMKYIPNKTSDRACELTNQVHYEGQAIVWVGPQEQAELYHEQLLRSGLTMAPLEPEGS

SEQ ID NO: 4311 - protein, 95 aa, Thermosynechococcus elongatus
ASVVPQERQQDTRKHYPNYKVIVLNDDFNTFRHVAACLMKYIPNKTSDRACELTNQVHYEGQAIVWVGPPELAELYHEQLLRAGLTMAPLEPEGS

SEQ ID NO: 4312 - protein, 95 aa, Thermosynechococcus elongatus
ASVVPQERQQDTRKHYPNYKVIVLNDDFNTFRHVAACLMKYIPNKTSDRVWELTNQVHYEGQAIVWVGPQEQAELYHEQLLRAGLTMAPLEPEGS

SEQ ID NO: 4313 - protein, 95 aa, Thermosynechococcus elongatus
ASVVPQERQQDTRKHYPNYKVIVLNDDFNTFRHVAACLMKYIPNKTSDRSWELTNQVHYEGQAIVWVGPQEQAELYHEQLLRAGLTMAPLEPEGS

SEQ ID NO: 4314 - protein, 95 aa, Thermosynechococcus elongatus
ASVVPQERQQDTRKHYPNYKVIVLNDDFNTFRHVAACLMKYIPNKTSDSAWELTNQVHYEGQAIVWVGPQEQAELYHEQLLRAGLTMAPLEPEGS

SEQ ID NO: 4315 - protein, 95 aa, Thermosynechococcus elongatus
ASVVPQERQQDTRKHYPNYKVIVLNDDFNTFRHVAACLMKYIPNKTSDIAWELTNQVHYEGQAIVWVGPQEQAELYHEQLLRAGLTMAPLEPKGS

SEQ ID NO: 4316 - protein, 95 aa, Thermosynechococcus elongatus
ASVVPQERQQDTRKHYPNYKVIVLNDDFNTFRHVAACLMKYIPNKTSDIAWELTNQVHYEGQAIVWVGPQEQAELYHEQLLRAGLTMAPLEPEGS

SEQ ID NO: 4317 - protein, 48 aa, Thermosynechococcus elongatus
ASVVPQERQQDTRKHYPNYKVIVLNDDFNTFRHVAACLMKYIPNKTSD

SEQ ID NO: 4318 - protein, 48 aa, Thermosynechococcus elongatus; identical to SEQ ID NO: 4317

SEQ ID NO: 4319 - protein, 95 aa, Thermosynechococcus elongatus
ASVVPQERQQDTRKHYPNYKVIVLNDDFNTFRHVAACLMKYIPNKTSYRAWELTNQVHYGGRAIVRVGPQEQAELYHEQLLRAGLTMAPLEPEGS

SEQ ID NO: 4320 - protein, 95 aa, Thermosynechococcus elongatus
ASVVPQERQQDTRKHYPNYKVIVLNDDFNTFRHVAACLMKYIPNKTFDRAWELTNQVHYEGQAIVWVGPQEQAELNHEQLLRAGLTMAPLEPEGS

SEQ ID NO: 4321 - protein, 95 aa, Thermosynechococcus elongatus
ASVVPQERQQDTRKHYPNYKVIVLNDDFNTFRHVAACLMKYIPNKTFDRAWELTNQVHYEGQAIVWVGPQEQAELYHEQLLRAGLTMAPLEPEGS

SEQ ID NO: 4322 - protein, 95 aa, Thermosynechococcus elongatus
ASVVPQERQQDTRKHYPNYKVIVLNDDFNTFRHVAACLMKYIPNKSSDRAWELTNQVHYEGQSIVWVGPQEQAELYHEQLLRAGLTMAPLEPEGS

SEQ ID NO: 4323 - protein, 95 aa, Thermosynechococcus elongatus
ASVVPQERQQDTRKHYPNYKVIVLNDDFNTFRHVAACLMKYIPNKISDRAWELTNQVHYGGRAIVWVGPQEQAELYHEQLLRAGLTMAPLEPEGS

SEQ ID NO: 4324 - protein, 95 aa, Thermosynechococcus elongatus
ASVVPQERQQDTRKHYPNYKVIVLNDDFNTFRHVAACLMKYIPNKASDRAWELTNQVHYEGQAIVWVGPQVQAELYHEQLLRAGLTMAPLEPEGS

SEQ ID NO: 4325 - protein, 95 aa, Thermosynechococcus elongatus
ASVVPQERQQDTRKHYPNYKVIVLNDDFNTFRHVAACLMKYIPNKASDRAWELTNQVHYEGQAIVWVGPQVQAELYHEQLLRAGLTMAPLEPGGS

SEQ ID NO: 4326 - protein, 95 aa, Thermosynechococcus elongatus
ASVVPQERQQDTRKHYPNYKVIVLNDDFNTFRHVAACLMKYIPNNTSDRAWELTNQVHYEGQAIVWVGPQVQAELYHEQLLRAGLTMAPLEPGGS

SEQ ID NO: 4327 - protein, 95 aa, Thermosynechococcus elongatus; identical to SEQ ID NO: 1518

SEQ ID NO: 4328 - protein, 95 aa, Thermosynechococcus elongatus
ASVVPQERQQDTRKHYPNYKVIVLNDDFNTFRHVAACLMKYIPNTTSDRAWELTNQVHYEGQAIVWVGPQVQAELYHEQLLRAGLTMAPLEPGGS

SEQ ID NO: 4329 - protein, 95 aa, Thermosynechococcus elongatus
ASVVPQERQQDTRKHYPNYKVIVLNDDFNTFRHVAACLMKYIPNITSDRAWELTNQVHYEGQAIVWVGPQVQAELYHEQLLRAGLTMAPLEPGGS

SEQ ID NO: 4330 - protein, 95 aa, Thermosynechococcus elongatus; identical to SEQ ID NO: 1519

SEQ ID NO: 4331 - protein, 95 aa, Thermosynechococcus elongatus
ASVVPQERQQDTRKHYPNYKVIVLNDDFNTFRHVAACLMKYIPNMNSDRAWELTNQVHYEGQAIVWVGPQVQAELYHEQLLRAGLTMAPLEPGGS

SEQ ID NO: 4332 - protein, 95 aa, Thermosynechococcus elongatus; identical to SEQ ID NO: 2

SEQ ID NO: 4333 - protein, 95 aa, Thermosynechococcus elongatus; identical to SEQ ID NO: 2

SEQ ID NO: 4334 - protein, 95 aa, Thermosynechococcus elongatus; identical to SEQ ID NO: 16

SEQ ID NO: 4335 - protein, 95 aa, Thermosynechococcus elongatus; identical to SEQ ID NO: 7

SEQ ID NO: 4336 - protein, 95 aa, Thermosynechococcus elongatus; identical to SEQ ID NO: 7

SEQ ID NO: 4337 - protein, 95 aa, Thermosynechococcus elongatus
ASVVPQERQQDTRKHYPNYKVIVLNDDFNTFRHVAACLMKYIPNMTTDRAWELTNQVHYEGQAIVWVGPQEQAELYHEQLLRAGLTMAPLEPEGS

SEQ ID NO: 4338 - protein, 95 aa, Thermosynechococcus elongatus
ASVVPQERQQDTRKHYPNYKVIVLNDDFNTFRHVAACLMKYIPNMTTDRAWELTNQVHYEGQAIVWVGPQVQAELYHEQLLRAGLTMAPLEPGGS

SEQ ID NO: 4339 - protein, 95 aa, Thermosynechococcus elongatus
ASVVPQERQQDTRKHYPNYKVIVLNDDFNTFRHVAACLMKYIPNMTPDRAWELTNQVHYEGQAIVWVGPQEQAELYHEQLLRAGLTMAPLEPGGS

SEQ ID NO: 4340 - protein, 95 aa, Thermosynechococcus elongatus
ASVVPQERQQDTRKHYPNYKVIVLNDDFNTFRHVAACLMKYIPNMTYDRAWELTNQVHYEGQAIVWVGPQEQAELNHEQLLRAGLTMAPLEPEGS

SEQ ID NO: 4341 - protein, 95 aa, Thermosynechococcus elongatus; identical to SEQ ID NO: 67

SEQ ID NO: 4342 - protein, 95 aa, Thermosynechococcus elongatus; identical to SEQ ID NO: 2

SEQ ID NO: 4343 - protein, 95 aa, Thermosynechococcus elongatus; identical to SEQ ID NO: 975

SEQ ID NO: 4344 - protein, 95 aa, Thermosynechococcus elongatus
ASVVPQERQQDTRKHYPNYKVIVLNDDFNTFRHVAACLMKYIPNMTSDKAWELTNQVHYEGQAIVWVGPQEQAELYHEQLLRAGLTMAPLEPEGS

SEQ ID NO: 4345 - protein, 95 aa, Thermosynechococcus elongatus; identical to SEQ ID NO: 4344

SEQ ID NO: 4346 - protein, 95 aa, Thermosynechococcus elongatus
ASVVPQERQQDTRKHYPNYKVIVLNDDFNTFRHVAACLMKYIPNMTSDRPWELTNQVHYEGQAIVWVGPQEQAELYHEQLLRAGLTMAPLEPEGS

SEQ ID NO: 4347 - protein, 95 aa, Thermosynechococcus elongatus; identical to SEQ ID NO: 2

SEQ ID NO: 4348 - protein, 95 aa, Thermosynechococcus elongatus; identical to SEQ ID NO: 2

SEQ ID NO: 4349 - protein, 95 aa, Thermosynechococcus elongatus
ASVVPQERQQDTRKHYPNYKVIVLNDDFNTFRHVAACLMKYIPNMTSDRARELTNQVHYEGQAIVWVGPQEQAELYHEQLLRAGLTMAPLEPEGS

SEQ ID NO: 4350 - protein, 95 aa, Thermosynechococcus elongatus
ASVVPQERQQDTRKHYPNYKVIVLNDDFNTFRHVAACLMKYIPNMTSDRARELTNQVHYGGRAIVWVGPQEQAELYHEQLLRAGLTMAPLEPGGS

SEQ ID NO: 4351 - protein, 95 aa, Thermosynechococcus elongatus
ASVVPQERQQDTRKHYPNYKVIVLNDDFNTFRHVAACLMKYIPNMTSDRAGELTNQVHYEGQAIVWVGPQEQAELYHEQLLRAGLTMAPLEPEGS

SEQ ID NO: 4352 - protein, 95 aa, Thermosynechococcus elongatus
ASVVPQERQQDTRKHYPNYKVIVLNDDFNTFRHVAACLMKYIPNMTSDRAGELTNQVHYEGQAIVWVGPQEQAELYHEQLLRAGLTLAPFEPEGS

SEQ ID NO: 4353 - protein, 95 aa, Thermosynechococcus elongatus
ASVVPQERQQDTRKHYPNYKVIVLNDDFNTFRHVAACLMKYIPNMTSDRAGELTNQVHYEGQAIVWVGPQVQAELYHEQLLRAGLTMAPLEPGGS

SEQ ID NO: 4354 - protein, 50 aa, Thermosynechococcus elongatus
ASVVPQERQQDTRKHYPNYKVIVLNDDFNTFRHVAACLMKYIPNMTSDRA

SEQ ID NO: 4355 - protein, 50 aa, Thermosynechococcus elongatus; identical to SEQ ID NO: 4354

SEQ ID NO: 4356 - protein, 95 aa, Thermosynechococcus elongatus; identical to SEQ ID NO: 265

SEQ ID NO: 4357 - protein, 95 aa, Thermosynechococcus elongatus
ASVVPQERQQDTRKHYPNYKVIVLNDDFNTFRHVAACLMKYIPNMTSDRACELTNQVHLEGQAIVWVGPQEQAELYHEQLLRAGLTMAPLEPEGS

SEQ ID NO: 4358 - protein, 95 aa, Thermosynechococcus elongatus; identical to SEQ ID NO: 2

SEQ ID NO: 4359 - protein, 95 aa, Thermosynechococcus elongatus
ASVVPQERQQDTRKHYPNYKVIVLNDDFNTFRHVAACLMKYIPNMTSDRAWEVTNQVHYEGQAIVWVGPQEQAELYHEQLLRAGLTMAPLEPEGS

SEQ ID NO: 4360 - protein, 95 aa, Thermosynechococcus elongatus; identical to SEQ ID NO: 4359

SEQ ID NO: 4361 - protein, 52 aa, Thermosynechococcus elongatus
ASVVPQERQQDTRKHYPNYKVIVLNDDFNTFRHVAACLMKYIPNMTSDRAWE

SEQ ID NO: 4362 - protein, 52 aa, Thermosynechococcus elongatus; identical to SEQ ID NO: 4361

SEQ ID NO: 4363 - protein, 95 aa, Thermosynechococcus elongatus; identical to SEQ ID NO: 712

SEQ ID NO: 4364 - protein, 80 aa, Thermosynechococcus elongatus
ASVVPQERQQDTRKHYPNYKVIVLNDDFNTFRHVAACLMKYIPNMTSDRAWELLTKFTTKVKLSFGLVHKNKLNYTTNNC

SEQ ID NO: 4365 - protein, 95 aa, Thermosynechococcus elongatus; identical to SEQ ID NO: 1018

SEQ ID NO: 4366 - protein, 95 aa, Thermosynechococcus elongatus
ASVVPQERQQDTRKHYPNYKVIVLNDDFNTFRHVAACLMKYIPNMTSDRAWELNNQVHYEGQAIVWVGPQVQAELYHEQLLRAGLTMAPLEPGGS

SEQ ID NO: 4367 - protein, 95 aa, Thermosynechococcus elongatus; identical to SEQ ID NO: 7

SEQ ID NO: 4368 - protein, 95 aa, Thermosynechococcus elongatus; identical to SEQ ID NO: 2

SEQ ID NO: 4369 - protein, 95 aa, Thermosynechococcus elongatus; identical to SEQ ID NO: 2

SEQ ID NO: 4370 - protein, 95 aa, Thermosynechococcus elongatus; identical to SEQ ID NO: 28

SEQ ID NO: 4371 - protein, 95 aa, Thermosynechococcus elongatus; identical to SEQ ID NO: 2

SEQ ID NO: 4372 - protein, 63 aa, Thermosynechococcus elongatus
ASVVPQERQQDTRKHYPNYKVIVLNDDFNTFRHVAACLMKYIPNMTSDRAWELTTKFTTKVKL

SEQ ID NO: 4373 - protein, 95 aa, Thermosynechococcus elongatus
ASVVPQERQQDTRKHYPNYKVIVLNDDFNTFRHVAACLMKYIPNMTSDRAWELTKQVHYEGQAIDWVGPQEQAELYHEQLLRAGLSMARLEPEGS

SEQ ID NO: 4374 - protein, 95 aa, Thermosynechococcus elongatus
ASVVPQERQQDTRKHYPNYKVIVLNDDFNTFRHVAACLMKYIPNMTSDRAWELTKQVHYEGQAIVWVGPQEQAELYHEQLLRAGLTMAPLEPGGS

SEQ ID NO: 4375 - protein, 58 aa, Thermosynechococcus elongatus
ASVVPQERQQDTRKHYPNYKVIVLNDDFNTFRHVAACLMKYIPNMTSDRAWELTNKVH

SEQ ID NO: 4376 - protein, 95 aa, Thermosynechococcus elongatus; identical to SEQ ID NO: 567

SEQ ID NO: 4377 - protein, 95 aa, Thermosynechococcus elongatus
ASVVPQERQQDTRKHYPNYKVIVLNDDFNTFRHVAACLMKYIPNMTSDRAWELTNKVHYEGQAIVWVGPQVQAELYHEQLVRAGLTMAPLVPEGS

SEQ ID NO: 4378 - protein, 95 aa, Thermosynechococcus elongatus
ASVVPQERQQDTRKHYPNYKVIVLNDDFNTFRHVAACLMKYIPNMTSDRAWELTNKVHYEGQAIVWVGPQVQAELYHEQLLRAGLTMAPLEPEGS

SEQ ID NO: 4379 - protein, 59 aa, Thermosynechococcus elongatus
ASVVPQERQQDTRKHYPNYKVIVLNDDFNTFRHVAACLMKYIPNMTSDRAWELTNKVHY

SEQ ID NO: 4380 - protein, 95 aa, Thermosynechococcus elongatus
ASVVPQERQQDTRKHYPNYKVIVLNDDFNTFRHVAACLMKYIPNMTSDRAWELTNQLHYEGQAIVLVGPQEQAELYHEQLLRAGLTMAPLEPEGS

SEQ ID NO: 4381 - protein, 58 aa, Thermosynechococcus elongatus
ASVVPQERQQDTRKHYPNYKVIVLNDDFNTFRHVAACLMKYIPNMTSDRAWELTNQLL

SEQ ID NO: 4382 - protein, 95 aa, Thermosynechococcus elongatus
ASVVPQERQQDTRKHYPNYKVIVLNDDFNTFRHVAACLMKYIPNMTSDRAWELTNQAHYEGRAIVWVGPQEQAELYHEQLLRAGLTMAPLEPEGS

SEQ ID NO: 4383 - protein, 95 aa, Thermosynechococcus elongatus
ASVVPQERQQDTRKHYPNYKVIVLNDDFNTFRHVAACLMKYIPNMTSDRAWELTNQGHYGGRAIVWVGPQEQAELYHEQLLRAGLTMAPLEPEGS

SEQ ID NO: 4384 - protein, 95 aa, Thermosynechococcus elongatus; identical to SEQ ID NO: 294

SEQ ID NO: 4385 - protein, 80 aa, Thermosynechococcus elongatus
ASVVPQERQQDTRKHYPNYKVIVLNDDFNTFRHVAACLMKYIPNMTSDRAWELTNQVTTKVKLSFGLVHKNKLNYTTNNC

SEQ ID NO: 4386 - protein, 95 aa, Thermosynechococcus elongatus
ASVVPQERQQDTRKHYPNYKVIVLNDDFNTFRHVAACLMKYIPNMTSDRAWELTNQVNYEGQAIVWVGPQEQAELYNEQLLRAGLTMATLEPEGS

SEQ ID NO: 4387 - protein, 95 aa, Thermosynechococcus elongatus; identical to SEQ ID NO: 1523

SEQ ID NO: 4388 - protein, 95 aa, Thermosynechococcus elongatus
ASVVPQERQQDTRKHYPNYKVIVLNDDFNTFRHVAACLMKYIPNMTSDRAWELTNQVQDEGQAIVWVGPQEQAELYHAQLLRAGLTMAPLEPEGS

SEQ ID NO: 4389 - protein, 95 aa, Thermosynechococcus elongatus
ASVVPQERQQDTRKHYPNYKVIVLNDDFNTFRHVAACLMKYIPNMTSDRAWELTNQVHHEGQAIVWVGPQEQAELYHEQLLRAGLTMAPLEPEGS

SEQ ID NO: 4390 - protein, 95 aa, Thermosynechococcus elongatus
ASVVPQERQQDTRKHYPNYKVIVLNDDFNTFRHVAACLMKYIPNMTSDRAWELTNQVHDEGQAIVWVGPQEQAELYHEQLLRAGLTMAPLEPGGS

SEQ ID NO: 4391 - protein, 95 aa, Thermosynechococcus elongatus
ASVVPQERQQDTRKHYPNYKVIVLNDDFNTFRHVAACLMKYIPNMTSDRAWELTNQVHDDGQAIVWVGPQVQAELYHEHLLRAGLTMAPLEPGGS

SEQ ID NO: 4392 - protein, 95 aa, Thermosynechococcus elongatus
ASVVPQERQQDTRKHYPNYKVIVLNDDFNTFRHVAACLMKYIPNMTSDRAWELTNQVHDGGRAIVWVGPQEQAELYHEQLLRAGLTMAPLEPEGS

SEQ ID NO: 4393 - protein, 58 aa, Thermosynechococcus elongatus; identical to SEQ ID NO: 569

SEQ ID NO: 4394 - protein, 58 aa, Thermosynechococcus elongatus; identical to SEQ ID NO: 569

SEQ ID NO: 4395 - protein, 58 aa, Thermosynechococcus elongatus; identical to SEQ ID NO: 569

SEQ ID NO: 4396 - protein, 58 aa, Thermosynechococcus elongatus; identical to SEQ ID NO: 569

SEQ ID NO: 4397 - protein, 58 aa, Thermosynechococcus elongatus; identical to SEQ ID NO: 569

SEQ ID NO: 4398 - protein, 95 aa, Thermosynechococcus elongatus
ASVVPQERQQDTRKHYPNYKVIVLNDDFNTFRHVAACLMKYIPNMTSDRAWELTNQVHYKGQAIVWVGPQEQAELNHEQLLRAGLTMARLEPEGS

SEQ ID NO: 4399 - protein, 95 aa, Thermosynechococcus elongatus
ASVVPQERQQDTRKHYPNYKVIVLNDDFNTFRHVAACLMKYIPNMTSDRAWELTNQVHYKGQAIVWVGPQEQAELNHELLLRAGLTMAPLVPEGS

SEQ ID NO: 4400 - protein, 95 aa, Thermosynechococcus elongatus
ASVVPQERQQDTRKHYPNYKVIVLNDDFNTFRHVAACLMKYIPNMTSDRAWELTNQVHYKGQAIVWVGPQEQAELNQELLLRAGLTMAPLEPEGS

SEQ ID NO: 4401 - protein, 95 aa, Thermosynechococcus elongatus
ASVVPQERQQDTRKHYPNYKVIVLNDDFNTFRHVAACLMKYIPNMTSDRAWELTNQVHYKGQAIVWVGPQEQAELNYEQLLRAGLTMAPLEPEGS

SEQ ID NO: 4402 - protein, 95 aa, Thermosynechococcus elongatus
ASVVPQERQQDTRKHYPNYKVIVLNDDFNTFRHVAACLMKYIPNMTSDRAWELTNQVHYKGQAIVCVGPQEQAEVYHEQLLRAGVTMAPLEPEGS

SEQ ID NO: 4403 - protein, 95 aa, Thermosynechococcus elongatus
ASVVPQERQQDTRKHYPNYKVIVLNDDFNTFRHVAACLMKYIPNMTSDRAWELTNQVHYKGQAIVCVGPQEQAELNHEQLLRAGLTMAPLEPEGS

SEQ ID NO: 4404 - protein, 95 aa, Thermosynechococcus elongatus
ASVVPQERQQDTRKHYPNYKVIVLNDDFNTFRHVAACLMKYIPNMTSDRAWELTNQVHYKGQAIVWVGPQGQAELYHEQLLRAGLTMAPLEPEGS

SEQ ID NO: 4405 - protein, 95 aa, Thermosynechococcus elongatus
ASVVPQERQQDTRKHYPNYKVIVLNDDFNTFRHVAACLMKYIPNMTSDRAWELTNQVHYQGQAIVWVGPQEQAELYHEQLLRAGLTMAPLEPEGS

SEQ ID NO: 4406 - protein, 95 aa, Thermosynechococcus elongatus
ASVVPQERQQDTRKHYPNYKVIVLNDDFNTFRHVAACLMKYIPNMTSDRAWELTNQVHYEAQAIVWVGPQEQAELYHEQLLRAGLTMAPLEPGGS

SEQ ID NO: 4407 - protein, 95 aa, Thermosynechococcus elongatus; identical to SEQ ID NO: 7

SEQ ID NO: 4408 - protein, 95 aa, Thermosynechococcus elongatus
ASVVPQERQQDTRKHYPNYKVIVLNDDFNTFRHVAACLMKYIPNMTSDRAWELTNQVHYEGQTIVWVGPQEQAELYHEQLLRAGLTMAPLEPEGS

SEQ ID NO: 4409 - protein, 95 aa, Thermosynechococcus elongatus
ASVVPQERQQDTRKHYPNYKVIVLNDDFNTFRHVAACLMKYIPNMTSDRAWELTNQVHYEGQTIVWVGPQVQAELYHEQLLRAGLTMAPLEPGGS

SEQ ID NO: 4410 - protein, 95 aa, Thermosynechococcus elongatus
ASVVPQERQQDTRKHYPNYKVIVLNDDFNTFRHVAACLMKYIPNMTSDRAWELTNQVHYEGQDIVWVGPQEQAELYHEQLLRAGLTLAPLVPEGS

SEQ ID NO: 4411 - protein, 95 aa, Thermosynechococcus elongatus; identical to SEQ ID NO: 2

SEQ ID NO: 4412 - protein, 95 aa, Thermosynechococcus elongatus; identical to SEQ ID NO: 2

SEQ ID NO: 4413 - protein, 95 aa, Thermosynechococcus elongatus; identical to SEQ ID NO: 2

SEQ ID NO: 4414 - protein, 95 aa, Thermosynechococcus elongatus; identical to SEQ ID NO: 40

SEQ ID NO: 4415 - protein, 95 aa, Thermosynechococcus elongatus; identical to SEQ ID NO: 7

SEQ ID NO: 4416 - protein, 95 aa, Thermosynechococcus elongatus; identical to SEQ ID NO: 128

SEQ ID NO: 4417 - protein, 95 aa, Thermosynechococcus elongatus
ASVVPQERQQDTRKHYPNYKVIVLNDDFNTFRHVAACLMKYIPNMTSDRAWELTNQVHYEGQAIVWVGHQEQAELYLEQLLRAGLTMAPLEPEGS

SEQ ID NO: 4418 - protein, 95 aa, Thermosynechococcus elongatus; identical to SEQ ID NO: 2

SEQ ID NO: 4419 - protein, 95 aa, Thermosynechococcus elongatus; identical to SEQ ID NO: 2

SEQ ID NO: 4420 - protein, 95 aa, Thermosynechococcus elongatus; identical to SEQ ID NO: 2

SEQ ID NO: 4421 - protein, 95 aa, Thermosynechococcus elongatus; identical to SEQ ID NO: 16

SEQ ID NO: 4422 - protein, 95 aa, Thermosynechococcus elongatus
ASVVPQERQQDTRKHYPNYKVIVLNDDFNTFRHVAACLMKYIPNMTSDRAWELTNQVHYEGQAIVWVGPQEQAELYHEHLLRAGLTLAPLEPEGS

SEQ ID NO: 4423 - protein, 95 aa, Thermosynechococcus elongatus
ASVVPQERQQDTRKHYPNYKVIVLNDDFNTFRHVAACLMKYIPNMTSDRAWELTNQVHYEGQAIVWVGPQEQAVLDHEQLLRAGLTMAPLEPEGS

SEQ ID NO: 4424 - protein, 95 aa, Thermosynechococcus elongatus; identical to SEQ ID NO: 1001

SEQ ID NO: 4425 - protein, 95 aa, Thermosynechococcus elongatus
ASVVPQERQQDTRKHYPNYKVIVLNDDFNTFRHVAACLMKYIPNMTSDRAWELTNQVHYEGQAIIWVGPQEQAELYHEQLLRAGLTMAPLEPEGS

SEQ ID NO: 4426 - protein, 95 aa, Thermosynechococcus elongatus
ASVVPQERQQDTRKHYPNYKVIVLNDDFNTFRHVAACLMKYIPNMTSDRAWELTNQVHYEGQAIDWVGPQEQAELYHEQLWRAGLTMAPLEPEGS

SEQ ID NO: 4427 - protein, 95 aa, Thermosynechococcus elongatus
ASVVPQERQQDTRKHYPNYKVIVLNDDFNTFRHVAACLMKYIPNMTSDRAWELTNQVHYEGQAIDWVGPQEQAELYHEQLLRAGLTIAPLEPEGS

SEQ ID NO: 4428 - protein, 95 aa, Thermosynechococcus elongatus
ASVVPQERQQDTRKHYPNYKVIVLNDDFNTFRHVAACLMKYIPNMTSDRAWELTNQVHYEGQAIDWVGPQAQAELYHEQLLRAGLTMAPLEPEGS

SEQ ID NO: 4429 - protein, 95 aa, Thermosynechococcus elongatus
ASVVPQERQQDTRKHYPNYKVIVLNDDFNTFRHVAACLMKYIPNMTSDRAWELTNQVHYEGQAIAWVGPQEQAELYHEQLLRAGLTMAPLEPEGS

SEQ ID NO: 4430 - protein, 95 aa, Thermosynechococcus elongatus; identical to SEQ ID NO: 67

SEQ ID NO: 4431 - protein, 95 aa, Thermosynechococcus elongatus; identical to SEQ ID NO: 2

SEQ ID NO: 4432 - protein, 95 aa, Thermosynechococcus elongatus
ASVVPQERQQDTRKHYPNYKVIVLNDDFNTFRHVAACLMKYIPNMTSDRAWELTNQVHYEGQAIVWVGPQEPAELNHEQLLRAGLTMAPLEPEGS

SEQ ID NO: 4433 - protein, 95 aa, Thermosynechococcus elongatus; identical to SEQ ID NO: 7

SEQ ID NO: 4434 - protein, 90 aa, Thermosynechococcus elongatus
ASVVPQERQQDTRKHYPNYKVIVLNDDFNTFRHVAACLMKYIPNMTSDRAWELTNQVHYEGQAIVFVGPQEQAELNHEQFLRAGLTMAPL

SEQ ID NO: 4435 - protein, 95 aa, Thermosynechococcus elongatus; identical to SEQ ID NO: 2

SEQ ID NO: 4436 - protein, 95 aa, Thermosynechococcus elongatus; identical to SEQ ID NO: 1532

SEQ ID NO: 4437 - protein, 95 aa, Thermosynechococcus elongatus
ASVVPQERQQDTRKHYPNYKVIVLNDDFNTFRHVAACLMKYIPNMTSDRAWELTNQVHYEGQAIVGVGPQEQAELYHEQLLRAGLTMAPLEPEGS

SEQ ID NO: 4438 - protein, 95 aa, Thermosynechococcus elongatus; identical to SEQ ID NO: 1534

SEQ ID NO: 4439 - protein, 95 aa, Thermosynechococcus elongatus
ASVVPQERQQDTRKHYPNYKVIVLNDDFNTFRHVAACLMKYIPNMTSDRAWELTNQVHYEGQAIVWGGPQEQAELYHEQLLRAGLTMAPLEPVGS

SEQ ID NO: 4440 - protein, 95 aa, Thermosynechococcus elongatus; identical to SEQ ID NO: 1567

SEQ ID NO: 4441 - protein, 95 aa, Thermosynechococcus elongatus; identical to SEQ ID NO: 2

SEQ ID NO: 4442 - protein, 95 aa, Thermosynechococcus elongatus; identical to SEQ ID NO: 7

SEQ ID NO: 4443 - protein, 95 aa, Thermosynechococcus elongatus
ASVVPQERQQDTRKHYPNYKVIVLNDDFNTFRHVAACLMKYIPNMTSDRAWELTNQVHYEGQAIVWVSPQEQAELYHEQLLRAGLTMAPLEPEGS

SEQ ID NO: 4444 - protein, 95 aa, Thermosynechococcus elongatus
ASVVPQERQQDTRKHYPNYKVIVLNDDFNTFRHVAACLMKYIPNMTSDRAWELTNQVHYEGQAIVWVDPQEQAELYHEQLLRAGLTIAPLEPEGS

SEQ ID NO: 4445 - protein, 95 aa, Thermosynechococcus elongatus
ASVVPQERQQDTRKHYPNYKVIVLNDDFNTFRHVAACLMKYIPNMTSDRAWELTNQVHYEGQAIVWVDPQVQAELYHEQLLRAGLTMAPLEPGGS

SEQ ID NO: 4446 - protein, 95 aa, Thermosynechococcus elongatus; identical to SEQ ID NO: 4008

SEQ ID NO: 4447 - protein, 95 aa, Thermosynechococcus elongatus; identical to SEQ ID NO: 401

SEQ ID NO: 4448 - protein, 95 aa, Thermosynechococcus elongatus
ASVVPQERQQDTRKHYPNYKVIVLNDDFNTFRHVAACLMKYIPNMTSDRAWELTNQVHYEGQAIVWVGTQEQAELYHEQLLSAGLTMAPLEPEGS

SEQ ID NO: 4449 - protein, 95 aa, Thermosynechococcus elongatus
ASVVPQERQQDTRKHYPNYKVIVLNDDFNTFRHVAACLMKYIPNMTSDRAWELTNQVHYEGQAIVWVGTQVQAELYHEQLLRAGLTMAPLEPEGS

SEQ ID NO: 4450 - protein, 95 aa, Thermosynechococcus elongatus
ASVVPQERQQDTRKHYPNYKVIVLNDDFNTFRHVAACLMKYIPNMTSDRAWELTNQVHYEGQAIVWVGQQVQAELYHEQLLRAGLTMAPLEPGGS

SEQ ID NO: 4451 - protein, 95 aa, Thermosynechococcus elongatus; identical to SEQ ID NO: 2

SEQ ID NO: 4452 - protein, 95 aa, Thermosynechococcus elongatus
ASVVPQERQQDTRKHYPNYKVIVLNDDFNTFRHVAACLMKYIPNMTSDRAWELTNQVHYEGQAIVWVGPQEQAELNHEQVLRAGLTMAPLEPEGS

SEQ ID NO: 4453 - protein, 79 aa, Thermosynechococcus elongatus
ASVVPQERQQDTRKHYPNYKVIVLNDDFNTFRHVAACLMKYIPNMTSDRAWELTNQVHYEGQAIVWVGPQEQAELNHEQ

SEQ ID NO: 4454 - protein, 95 aa, Thermosynechococcus elongatus
ASVVPQERQQDTRKHYPNYKVIVLNDDFNTFRHVAACLMKYIPNMTSDRAWELTNQVHYEGQAIVWVGPQEQAELNHEQLLRTGLTMAPLEPEGS

SEQ ID NO: 4455 - protein, 95 aa, Thermosynechococcus elongatus
ASVVPQERQQDTRKHYPNYKVIVLNDDFNTFRHVAACLMKYIPNMTSDRAWELTNQVHYEGQAIVWVGPQEQAELNHEQLLRAGLTIAPLEPEGS

SEQ ID NO: 4456 - protein, 95 aa, Thermosynechococcus elongatus; identical to SEQ ID NO: 67

SEQ ID NO: 4457 - protein, 95 aa, Thermosynechococcus elongatus
ASVVPQERQQDTRKHYPNYKVIVLNDDFNTFRHVAACLMKYIPNMTSDRAWELTNQVHYEGQAIVWVGPQEQAELNHEQLLRAGLTMAPLKPEGS

SEQ ID NO: 4458 - protein, 95 aa, Thermosynechococcus elongatus
ASVVPQERQQDTRKHYPNYKVIVLNDDFNTFRHVAACLMKYIPNMTSDRAWELTNQVHYEGQAIVWVGPQEQAELNHEQLLRAGLTMAPLEPDGS

SEQ ID NO: 4459 - protein, 95 aa, Thermosynechococcus elongatus; identical to SEQ ID NO: 1530

SEQ ID NO: 4460 - protein, 95 aa, Thermosynechococcus elongatus
ASVVPQERQQDTRKHYPNYKVIVLNDDFNTFRHVAACLMKYIPNMTSDRAWELTNQVHYEGQAIVWVGPQEQAELNHEHLLRAGLTMAPLEPEGS

SEQ ID NO: 4461 - protein, 95 aa, Thermosynechococcus elongatus
ASVVPQERQQDTRKHYPNYKVIVLNDDFNTFRHVAACLMKYIPNMTSDRAWELTNQVHYEGQAIVWVGPQEQAELHHEQLLRAGLTMAPLEPEGS

SEQ ID NO: 4462 - protein, 95 aa, Thermosynechococcus elongatus
ASVVPQERQQDTRKHYPNYKVIVLNDDFNTFRHVAACLMKYIPNMTSDRAWELTNQVHYEGQAIVWVGPQEQAELDHEQWLRAGLTMAPLEPEGS

SEQ ID NO: 4463 - protein, 75 aa, Thermosynechococcus elongatus
ASVVPQERQQDTRKHYPNYKVIVLNDDFNTFRHVAACLMKYIPNMTSDRAWELTNQVHYEGQAIVWVGPQEQAEL

SEQ ID NO: 4464 - protein, 75 aa, Thermosynechococcus elongatus; identical to SEQ ID NO: 4463

SEQ ID NO: 4465 - protein, 95 aa, Thermosynechococcus elongatus
ASVVPQERQQDTRKHYPNYKVIVLNDDFNTFRHVAACLMKYIPNMTSDRAWELTNQVHYEGQAIVWVGPQEQAELYQEQLLRAGLTMAPLEPEGS

SEQ ID NO: 4466 - protein, 95 aa, Thermosynechococcus elongatus
ASVVPQERQQDTRKHYPNYKVIVLNDDFNTFRHVAACLMKYIPNMTSDRAWELTNQVHYEGQAIVWVGPQEQAELYQEPLLRAGLTMAPLEPEGS

SEQ ID NO: 4467 - protein, 95 aa, Thermosynechococcus elongatus
ASVVPQERQQDTRKHYPNYKVIVLNDDFNTFRHVAACLMKYIPNMTSDRAWELTNQVHYEGQAIVWVGPQEQAELYHKQLLRAGLTMAPLEPGGS

SEQ ID NO: 4468 - protein, 95 aa, Thermosynechococcus elongatus
ASVVPQERQQDTRKHYPNYKVIVLNDDFNTFRHVAACLMKYIPNMTSDRAWELTNQVHYEGQAIVWVGPQEQAELYHKQLFRAGLTMAPLEPEGS

SEQ ID NO: 4469 - protein, 95 aa, Thermosynechococcus elongatus
ASVVPQERQQDTRKHYPNYKVIVLNDDFNTFRHVAACLMKYIPNMTSDRAWELTNQVHYEGQAIVWVGPQEQAELYHEKLLRAGLTMAPLEPEGS

SEQ ID NO: 4470 - protein, 95 aa, Thermosynechococcus elongatus; identical to SEQ ID NO: 719

SEQ ID NO: 4471 - protein, 95 aa, Thermosynechococcus elongatus; identical to SEQ ID NO: 344

SEQ ID NO: 4472 - protein, 95 aa, Thermosynechococcus elongatus; identical to SEQ ID NO: 344

SEQ ID NO: 4473 - protein, 95 aa, Thermosynechococcus elongatus
ASVVPQERQQDTRKHYPNYKVIVLNDDFNTFRHVAACLMKYIPNMTSDRAWELTNQVHYEGQAIVWVGPQEQAELYHEQWLRAGLTRAPLEPEGS

SEQ ID NO: 4474 - protein, 80 aa, Thermosynechococcus elongatus
ASVVPQERQQDTRKHYPNYKVIVLNDDFNTFRHVAACLMKYIPNMTSDRAWELTNQVHYEGQAIVWVGPQEQAELYHEQL

SEQ ID NO: 4475 - protein, 80 aa, Thermosynechococcus elongatus; identical to SEQ ID NO: 4474

SEQ ID NO: 4476 - protein, 84 aa, Thermosynechococcus elongatus
ASVVPQERQQDTRKHYPNYKVIVLNDDFNTFRHVAACLMKYIPNMTSDRAWELTNQVHYEGQAIVWVGPQEQAELYHEQLLELV

SEQ ID NO: 4477 - protein, 95 aa, Thermosynechococcus elongatus; identical to SEQ ID NO: 64

SEQ ID NO: 4478 - protein, 95 aa, Thermosynechococcus elongatus; identical to SEQ ID NO: 2

SEQ ID NO: 4479 - protein, 95 aa, Thermosynechococcus elongatus; identical to SEQ ID NO: 2

SEQ ID NO: 4480 - protein, 95 aa, Thermosynechococcus elongatus; identical to SEQ ID NO: 2

SEQ ID NO: 4481 - protein, 95 aa, Thermosynechococcus elongatus
ASVVPQERQQDTRKHYPNYKVIVLNDDFNTFRHVAACLMKYIPNMTSDRAWELTNQVHYEGQAIVWVGPQEQAELYHEQLLRADLTMAPLEPEGS

SEQ ID NO: 4482 - protein, 95 aa, Thermosynechococcus elongatus; identical to SEQ ID NO: 346

SEQ ID NO: 4483 - protein, 95 aa, Thermosynechococcus elongatus
ASVVPQERQQDTRKHYPNYKVIVLNDDFNTFRHVAACLMKYIPNMTSDRAWELTNQVHYEGQAIVWVGPQEQAELYHEQLLRAGMTMAPLEPEGS

SEQ ID NO: 4484 - protein, 84 aa, Thermosynechococcus elongatus
ASVVPQERQQDTRKHYPNYKVIVLNDDFNTFRHVAACLMKYIPNMTSDRAWELTNQVHYEGQAIVWVGPQEQAELYHEQLLRAG

SEQ ID NO: 4485 - protein, 95 aa, Thermosynechococcus elongatus
ASVVPQERQQDTRKHYPNYKVIVLNDDFNTFRHVAACLMKYIPNMTSDRAWELTNQVHYEGQAIVWVGPQEQAELYHEQLLRAGSTMAPLEPEGS

SEQ ID NO: 4486 - protein, 95 aa, Thermosynechococcus elongatus; identical to SEQ ID NO: 16

SEQ ID NO: 4487 - protein, 95 aa, Thermosynechococcus elongatus; identical to SEQ ID NO: 2

SEQ ID NO: 4488 - protein, 95 aa, Thermosynechococcus elongatus; identical to SEQ ID NO: 346

SEQ ID NO: 4489 - protein, 95 aa, Thermosynechococcus elongatus; identical to SEQ ID NO: 346

SEQ ID NO: 4490 - protein, 95 aa, Thermosynechococcus elongatus
ASVVPQERQQDTRKHYPNYKVIVLNDDFNTFRHVAACLMKYIPNMTSDRAWELTNQVHYEGQAIVWVGPQEQAELYHEQLLRAGLTIAPLEPKGS

SEQ ID NO: 4491 - protein, 95 aa, Thermosynechococcus elongatus
ASVVPQERQQDTRKHYPNYKVIVLNDDFNTFRHVAACLMKYIPNMTSDRAWELTNQVHYEGQAIVWVGPQEQAELYHEQLLRAGLTMPPLEPEGS

SEQ ID NO: 4492 - protein, 95 aa, Thermosynechococcus elongatus
ASVVPQERQQDTRKHYPNYKVIVLNDDFNTFRHVAACLMKYIPNMTSDRAWELTNQVHYEGQAIVWVGPQEQAELYHEQLLRAGLTMDPLEPGGS

SEQ ID NO: 4493 - protein, 95 aa, Thermosynechococcus elongatus; identical to SEQ ID NO: 2

SEQ ID NO: 4494 - protein, 95 aa, Thermosynechococcus elongatus; identical to SEQ ID NO: 157

SEQ ID NO: 4495 - protein, 95 aa, Thermosynechococcus elongatus
ASVVPQERQQDTRKHYPNYKVIVLNDDFNTFRHVAACLMKYIPNMTSDRAWELTNQVHYEGQAIVWVGPQEQAELYHEQLLRAGLTMATFVPEGS

SEQ ID NO: 4496 - protein, 95 aa, Thermosynechococcus elongatus
ASVVPQERQQDTRKHYPNYKVIVLNDDFNTFRHVAACLMKYIPNMTSDRAWELTNQVHYEGQAIVWVGPQEQAELYHEQLLRAGLTMAQLEPVGS

SEQ ID NO: 4497 - protein, 95 aa, Thermosynechococcus elongatus
ASVVPQERQQDTRKHYPNYKVIVLNDDFNTFRHVAACLMKYIPNMTSDRAWELTNQVHYEGQAIVWVGPQEQAELYHEQLLRAGLTMAPLESEGS

SEQ ID NO: 4498 - protein, 95 aa, Thermosynechococcus elongatus; identical to SEQ ID NO: 2

SEQ ID NO: 4499 - protein, 95 aa, Thermosynechococcus elongatus; identical to SEQ ID NO: 2

SEQ ID NO: 4500 - protein, 95 aa, Thermosynechococcus elongatus; identical to SEQ ID NO: 989

SEQ ID NO: 4501 - protein, 95 aa, Thermosynechococcus elongatus
ASVVPQERQQDTRKHYPNYKVIVLNDDFNTFRHVAACLMKYIPNMTSDRAWELTNQVHYEGQAIVWVGPQEQAELYHEQLLRAGLTMAPLELEGS

SEQ ID NO: 4502 - protein, 95 aa, Thermosynechococcus elongatus; identical to SEQ ID NO: 2

SEQ ID NO: 4503 - protein, 95 aa, Thermosynechococcus elongatus
ASVVPQERQQDTRKHYPNYKVIVLNDDFNTFRHVAACLMKYIPNMTSDRAWELTNQVHYEGQAIVWVGPQEQAELYHEQLLRAGLTMAPLDPEGS

SEQ ID NO: 4504 - protein, 95 aa, Thermosynechococcus elongatus
ASVVPQERQQDTRKHYPNYKVIVLNDDFNTFRHVAACLMKYIPNMTSDRAWELTNQVHYEGQAIVWVGPQEQAELYHEQLLRAGLTMAPLDPGGS

SEQ ID NO: 4505 - protein, 95 aa, Thermosynechococcus elongatus
ASVVPQERQQDTRKHYPNYKVIVLNDDFNTFRHVAACLMKYIPNMTSDRAWELTNQVHYEGQAIVWVGPQEQAELYHEQLLRAGLTMAPLGPEGS

SEQ ID NO: 4506 - protein, 95 aa, Thermosynechococcus elongatus
ASVVPQERQQDTRKHYPNYKVIVLNDDFNTFRHVAACLMKYIPNMTSDRAWELTNQVHYEGQAIVWVGPQEQAELYHEQLLRAGLTMAPFEPGGS

SEQ ID NO: 4507 - protein, 95 aa, Thermosynechococcus elongatus; identical to SEQ ID NO: 2

SEQ ID NO: 4508 - protein, 95 aa, Thermosynechococcus elongatus; identical to SEQ ID NO: 2

SEQ ID NO: 4509 - protein, 95 aa, Thermosynechococcus elongatus
ASVVPQERQQDTRKHYPNYKVIVLNDDFNTFRHVAACLMKYIPNMTSDRAWELTNQVHYEGQAIVWVGPQEQAELYHEQLLRAGLTMARLEPEGS

SEQ ID NO: 4510 - protein, 95 aa, Thermosynechococcus elongatus
ASVVPQERQQDTRKHYPNYKVIVLNDDFNTFRHVAACLMKYIPNMTSDRAWELTNQVHYEGQAIVWVGPQEQAELYHEQLLRAGLTMALLEPEGS

SEQ ID NO: 4511 - protein, 95 aa, Thermosynechococcus elongatus
ASVVPQERQQDTRKHYPNYKVIVLNDDFNTFRHVAACLMKYIPNMTSDRAWELTNQVHYEGQAIVWVGPQEQAELYHEQLLRAGLTMAALEREGS

SEQ ID NO: 4512 - protein, 95 aa, Thermosynechococcus elongatus
ASVVPQERQQDTRKHYPNYKVIVLNDDFNTFRHVAACLMKYIPNMTSDRAWELTNQVHYEGQAIVWVGPQEQAELYHEQLLRAGLTMVPLEPEGS

SEQ ID NO: 4513 - protein, 95 aa, Thermosynechococcus elongatus; identical to SEQ ID NO: 724

SEQ ID NO: 4514 - protein, 95 aa, Thermosynechococcus elongatus
ASVVPQERQQDTRKHYPNYKVIVLNDDFNTFRHVAACLMKYIPNMTSDRAWELTNQVHYEGQAIVWVGPQEQAELYHEQLLRAGLTIAPFEPEGS

SEQ ID NO: 4515 - protein, 95 aa, Thermosynechococcus elongatus
ASVVPQERQQDTRKHYPNYKVIVLNDDFNTFRHVAACLMKYIPNMTSDRAWELTNQVHYEGQAIVWVGPQEQAELYHEQLLRAGLTLATLEPEGS

SEQ ID NO: 4516 - protein, 95 aa, Thermosynechococcus elongatus
ASVVPQERQQDTRKHYPNYKVIVLNDDFNTFRHVAACLMKYIPNMTSDRAWELTNQVHYEGQAIVWVGPQEQAELYHEQLLRAGLTLAPLEPGGS

SEQ ID NO: 4517 - protein, 95 aa, Thermosynechococcus elongatus
ASVVPQERQQDTRKHYPNYKVIVLNDDFNTFRHVAACLMKYIPNMTSDRAWELTNQVHYEGQAIVWVGPQEQAELYHEQLLRAGLTVAPLEPGGS

SEQ ID NO: 4518 - protein, 95 aa, Thermosynechococcus elongatus; identical to SEQ ID NO: 4516

SEQ ID NO: 4519 - protein, 95 aa, Thermosynechococcus elongatus; identical to SEQ ID NO: 993

SEQ ID NO: 4520 - protein, 95 aa, Thermosynechococcus elongatus
ASVVPQERQQDTRKHYPNYKVIVLNDDFNTFRHVAACLMKYIPNMTSDRAWELTNQVHYEGQAIVWVGPQEQAELYHEQLLRAVLTMAPLEPEGS

SEQ ID NO: 4521 - protein, 83 aa, Thermosynechococcus elongatus
ASVVPQERQQDTRKHYPNYKVIVLNDDFNTFRHVAACLMKYIPNMTSDRAWELTNQVHYEGQAIVWVGPQEQAELYHEQLLRA

SEQ ID NO: 4522 - protein, 95 aa, Thermosynechococcus elongatus
ASVVPQERQQDTRKHYPNYKVIVLNDDFNTFRHVAACLMKYIPNMTSDRAWELTNQVHYEGQAIVWVGPQEQAELYHEQLLRVGLTLAPLEPEGS

SEQ ID NO: 4523 - protein, 95 aa, Thermosynechococcus elongatus
ASVVPQERQQDTRKHYPNYKVIVLNDDFNTFRHVAACLMKYIPNMTSDRAWELTNQVHYEGQAIVWVGPQEQAELYHEQLLRVGLTIAPLEPEGS

SEQ ID NO: 4524 - protein, 95 aa, Thermosynechococcus elongatus; identical to SEQ ID NO: 728

SEQ ID NO: 4525 - protein, 95 aa, Thermosynechococcus elongatus; identical to SEQ ID NO: 2

SEQ ID NO: 4526 - protein, 95 aa, Thermosynechococcus elongatus; identical to SEQ ID NO: 16

SEQ ID NO: 4527 - protein, 95 aa, Thermosynechococcus elongatus; identical to SEQ ID NO: 728

SEQ ID NO: 4528 - protein, 95 aa, Thermosynechococcus elongatus; identical to SEQ ID NO: 477

SEQ ID NO: 4529 - protein, 95 aa, Thermosynechococcus elongatus
ASVVPQERQQDTRKHYPNYKVIVLNDDFNTFRHVAACLMKYIPNMTSDRAWELTNQVHYEGQAIVWVGPQEQAELYHEQLLGACLTMAPLEPEGS

SEQ ID NO: 4530 - protein, 95 aa, Thermosynechococcus elongatus; identical to SEQ ID NO: 729

SEQ ID NO: 4531 - protein, 95 aa, Thermosynechococcus elongatus
ASVVPQERQQDTRKHYPNYKVIVLNDDFNTFRHVAACLMKYIPNMTSDRAWELTNQVHYEGQAIVWVGPQEQAELYHEQFLRAGLTMAPLEPGGS

SEQ ID NO: 4532 - protein, 95 aa, Thermosynechococcus elongatus; identical to SEQ ID NO: 167

SEQ ID NO: 4533 - protein, 95 aa, Thermosynechococcus elongatus
ASVVPQERQQDTRKHYPNYKVIVLNDDFNTFRHVAACLMKYIPNMTSDRAWELTNQVHYEGQAIVWVGPQEQAELYHEHLLRAGLTMAPLEQEGS

SEQ ID NO: 4534 - protein, 95 aa, Thermosynechococcus elongatus; identical to SEQ ID NO: 167

SEQ ID NO: 4535 - protein, 95 aa, Thermosynechococcus elongatus
ASVVPQERQQDTRKHYPNYKVIVLNDDFNTFRHVAACLMKYIPNMTSDRAWELTNQVHYEGQAIVWVGPQEQAELYHERLLRAGLTMAPLEPGGS

SEQ ID NO: 4536 - protein, 95 aa, Thermosynechococcus elongatus; identical to SEQ ID NO: 3964

SEQ ID NO: 4537 - protein, 95 aa, Thermosynechococcus elongatus; identical to SEQ ID NO: 478

SEQ ID NO: 4538 - protein, 95 aa, Thermosynechococcus elongatus; identical to SEQ ID NO: 2

SEQ ID NO: 4539 - protein, 95 aa, Thermosynechococcus elongatus; identical to SEQ ID NO: 1560

SEQ ID NO: 4540 - protein, 95 aa, Thermosynechococcus elongatus
ASVVPQERQQDTRKHYPNYKVIVLNDDFNTFRHVAACLMKYIPNMTSDRAWELTNQVHYEGQAIVWVGPQEQAELYHAQLVRAGLTMAPLEPEGS

SEQ ID NO: 4541 - protein, 77 aa, Thermosynechococcus elongatus; identical to SEQ ID NO: 176

SEQ ID NO: 4542 - protein, 95 aa, Thermosynechococcus elongatus; identical to SEQ ID NO: 2

SEQ ID NO: 4543 - protein, 95 aa, Thermosynechococcus elongatus
ASVVPQERQQDTRKHYPNYKVIVLNDDFNTFRHVAACLMKYIPNMTSDRAWELTNQVHYEGQAIVWVGPQEQAELYPEQLLRTGLTMAPLEPEGS

SEQ ID NO: 4544 - protein, 95 aa, Thermosynechococcus elongatus
ASVVPQERQQDTRKHYPNYKVIVLNDDFNTFRHVAACLMKYIPNMTSDRAWELTNQVHYEGQAIVWVGPQEQAELYPEQLLRAGLTMAPLEPGGS

SEQ ID NO: 4545 - protein, 95 aa, Thermosynechococcus elongatus; identical to SEQ ID NO: 1562

SEQ ID NO: 4546 - protein, 95 aa, Thermosynechococcus elongatus
ASVVPQERQQDTRKHYPNYKVIVLNDDFNTFRHVAACLMKYIPNMTSDRAWELTNQVHYEGQAIVWVGPQEQAELYLEQLLRAGLTMAPLEPEGS

SEQ ID NO: 4547 - protein, 95 aa, Thermosynechococcus elongatus
ASVVPQERQQDTRKHYPNYKVIVLNDDFNTFRHVAACLMKYIPNMTSDRAWELTNQVHYEGQAIVWVGPQEQAELYYEQLLRAGLTMAPLEPEGS

SEQ ID NO: 4548 - protein, 95 aa, Thermosynechococcus elongatus; identical to SEQ ID NO: 16

SEQ ID NO: 4549 - protein, 90 aa, Thermosynechococcus elongatus
ASVVPQERQQDTRKHYPNYKVIVLNDDFNTFRHVAACLMKYIPNMTSDRAWELTNQVHYEGQAIVWVGPQEQAELSHEQLLRAGLTMAPL

SEQ ID NO: 4550 - protein, 95 aa, Thermosynechococcus elongatus
ASVVPQERQQDTRKHYPNYKVIVLNDDFNTFRHVAACLMKYIPNMTSDRAWELTNQVHYEGQAIVWVGPQEQAELSHEHLLRAGLTMAPLEPEGS

SEQ ID NO: 4551 - protein, 95 aa, Thermosynechococcus elongatus
ASVVPQERQQDTRKHYPNYKVIVLNDDFNTFRHVAACLMKYIPNMTSDRAWELTNQVHYEGQAIVWVGPQEQAELCHEQLLRAGLTMAPLEPEGS

SEQ ID NO: 4552 - protein, 95 aa, Thermosynechococcus elongatus
ASVVPQERQQDTRKHYPNYKVIVLNDDFNTFRHVAACLMKYIPNMTSDRAWELTNQVHYEGQAIVWVGPQEQADLYHEQLLRAGLTMAPLEPEGS

SEQ ID NO: 4553 - protein, 90 aa, Thermosynechococcus elongatus
ASVVPQERQQDTRKHYPNYKVIVLNDDFNTFRHVAACLMKYIPNMTSDRAWELTNQVHYEGQAIVWVGPQEQAVLYHEQLLRACLTMAPL

SEQ ID NO: 4554 - protein, 95 aa, Thermosynechococcus elongatus
ASVVPQERQQDTRKHYPNYKVIVLNDDFNTFRHVAACLMKYIPNMTSDRAWELTNQVHYEGQAIVWVGPQEQAVLYHELLLRAGLTMAPLEPEGS

SEQ ID NO: 4555 - protein, 95 aa, Thermosynechococcus elongatus
ASVVPQERQQDTRKHYPNYKVIVLNDDFNTFRHVAACLMKYIPNMTSDRAWELTNQVHYEGQAIVWVGPQEQGELYHEQLLRAGLTMAPLEPEGS

SEQ ID NO: 4556 - protein, 95 aa, Thermosynechococcus elongatus
ASVVPQERQQDTRKHYPNYKVIVLNDDFNTFRHVAACLMKYIPNMTSDRAWELTNQVHYEGQAIVWVGPQEQSELYHEQLLRAGLTMAPLEPEGS

SEQ ID NO: 4557 - protein, 79 aa, Thermosynechococcus elongatus
ASVVPQERQQDTRKHYPNYKVIVLNDDFNTFRHVAACLMKYIPNMTSDRAWELTNQVHYEGQAIVWVGPQEHAELYHEQ

SEQ ID NO: 4558 - protein, 95 aa, Thermosynechococcus elongatus
ASVVPQERQQDTRKHYPNYKVIVLNDDFNTFRHVAACLMKYIPNMTSDRAWELTNQVHYEGQAIVWVGPQEHAELYHEQLLRAGLTLAPWEPEGS

SEQ ID NO: 4559 - protein, 95 aa, Thermosynechococcus elongatus
ASVVPQERQQDTRKHYPNYKVIVLNDDFNTFRHVAACLMKYIPNMTSDRAWELTNQVHYEGQAIVWVGPQEPAELYHEQLLRAGLTMAPLEPEGS

SEQ ID NO: 4560 - protein, 95 aa, Thermosynechococcus elongatus; identical to SEQ ID NO: 4559

SEQ ID NO: 4561 - protein, 95 aa, Thermosynechococcus elongatus
ASVVPQERQQDTRKHYPNYKVIVLNDDFNTFRHVAACLMKYIPNMTSDRAWELTNQVHYEGQAIVWVGPQEPAELYHEQLLRAGLTMAPLVPEGS

SEQ ID NO: 4562 - protein, 95 aa, Thermosynechococcus elongatus
ASVVPQERQQDTRKHYPNYKVIVLNDDFNTFRHVAACLMKYIPNMTSDRAWELTNQVHYEGQAIVWVGPQEPAELYHEHLLRAGLTMAPLEPGGS

SEQ ID NO: 4563 - protein, 95 aa, Thermosynechococcus elongatus
ASVVPQERQQDTRKHYPNYKVIVLNDDFNTFRHVAACLMKYIPNMTSDRAWELTNQVHYEGQAIVWVGPQELAELYHEQLLRAGLTMAPLEPEGS

SEQ ID NO: 4564 - protein, 95 aa, Thermosynechococcus elongatus
ASVVPQERQQDTRKHYPNYKVIVLNDDFNTFRHVAACLMKYIPNMTSDRAWELTNQVHYEGQAIVWVGPQELAELYHEHLLRAGLTMAPLEPEGS

SEQ ID NO: 4565 - protein, 95 aa, Thermosynechococcus elongatus; identical to SEQ ID NO: 2

SEQ ID NO: 4566 - protein, 95 aa, Thermosynechococcus elongatus; identical to SEQ ID NO: 2

SEQ ID NO: 4567 - protein, 95 aa, Thermosynechococcus elongatus; identical to SEQ ID NO: 1567

SEQ ID NO: 4568 - protein, 95 aa, Thermosynechococcus elongatus
ASVVPQERQQDTRKHYPNYKVIVLNDDFNTFRHVAACLMKYIPNMTSDRAWELTNQVHYEGQAIVWVGPQVQDELYHEQLLRAGLTMAPLEPGGS

SEQ ID NO: 4569 - protein, 80 aa, Thermosynechococcus elongatus
ASVVPQERQQDTRKHYPNYKVIVLNDDFNTFRHVAACLMKYIPNMTSDRAWELTNQVHYEGQAIVWVGPQVQAEFTTNNC

SEQ ID NO: 4570 - protein, 95 aa, Thermosynechococcus elongatus; identical to SEQ ID NO: 7

SEQ ID NO: 4571 - protein, 95 aa, Thermosynechococcus elongatus
ASVVPQERQQDTRKHYPNYKVIVLNDDFNTFRHVAACLMKYIPNMTSDRAWELTNQVHYEGQAIVWVGPQVQAELYHEQVLRAGLTMAPLEPGGS

SEQ ID NO: 4572 - protein, 95 aa, Thermosynechococcus elongatus
ASVVPQERQQDTRKHYPNYKVIVLNDDFNTFRHVAACLMKYIPNMTSDRAWELTNQVHYEGQAIVWVGPQVQAELYHEQSLRAGLTMAPLEPGGS

SEQ ID NO: 4573 - protein, 95 aa, Thermosynechococcus elongatus
ASVVPQERQQDTRKHYPNYKVIVLNDDFNTFRHVAACLMKYIPNMTSDRAWELTNQVHYEGQAIVWVGPQVQAELYHEQLVRAGLTMAPLEPEGS

SEQ ID NO: 4574 - protein, 95 aa, Thermosynechococcus elongatus
ASVVPQERQQDTRKHYPNYKVIVLNDDFNTFRHVAACLMKYIPNMTSDRAWELTNQVHYEGQAIVWVGPQVQAELYHEQLWRAGLTMAPLEPGGS

SEQ ID NO: 4575 - protein, 95 aa, Thermosynechococcus elongatus; identical to SEQ ID NO: 7

SEQ ID NO: 4576 - protein, 95 aa, Thermosynechococcus elongatus; identical to SEQ ID NO: 40

SEQ ID NO: 4577 - protein, 95 aa, Thermosynechococcus elongatus
ASVVPQERQQDTRKHYPNYKVIVLNDDFNTFRHVAACLMKYIPNMTSDRAWELTNQVHYEGQAIVWVGPQVQAELYHEQLLRAGLTMATLEPGGS

SEQ ID NO: 4578 - protein, 95 aa, Thermosynechococcus elongatus; identical to SEQ ID NO: 7

SEQ ID NO: 4579 - protein, 95 aa, Thermosynechococcus elongatus
ASVVPQERQQDTRKHYPNYKVIVLNDDFNTFRHVAACLMKYIPNMTSDRAWELTNQVHYEGQAIVWVGPQVQAELYHEQLLRAGLTMAPSEPGGS

SEQ ID NO: 4580 - protein, 95 aa, Thermosynechococcus elongatus
ASVVPQERQQDTRKHYPNYKVIVLNDDFNTFRHVAACLMKYIPNMTSDRAWELTNQVHYEGQAIVWVGPQVQAELYHEQLLRAGLTMAPWEPGGS

SEQ ID NO: 4581 - protein, 95 aa, Thermosynechococcus elongatus
ASVVPQERQQDTRKHYPNYKVIVLNDDFNTFRHVAACLMKYIPNMTSDRAWELTNQVHYEGQAIVWVGPQVQAELYHEQLLRAGLTMAPLEPKGS

SEQ ID NO: 4582 - protein, 95 aa, Thermosynechococcus elongatus
ASVVPQERQQDTRKHYPNYKVIVLNDDFNTFRHVAACLMKYIPNMTSDRAWELTNQVHYEGQAIVWVGPQVQAELYHEQLLRAGLTMAPLERGGS

SEQ ID NO: 4583 - protein, 95 aa, Thermosynechococcus elongatus
ASVVPQERQQDTRKHYPNYKVIVLNDDFNTFRHVAACLMKYIPNMTSDRAWELTNQVHYEGQAIVWVGPQVQAELYHEQLLRAGLTMAPLVPGGS

SEQ ID NO: 4584 - protein, 90 aa, Thermosynechococcus elongatus
ASVVPQERQQDTRKHYPNYKVIVLNDDFNTFRHVAACLMKYIPNMTSDRAWELTNQVHYEGQAIVWVGPQVQAELYHEQLLRAGLTMAPL

SEQ ID NO: 4585 - protein, 95 aa, Thermosynechococcus elongatus
ASVVPQERQQDTRKHYPNYKVIVLNDDFNTFRHVAACLMKYIPNMTSDRAWELTNQVHYEGQAIVWVGPQVQAELYHEQLLRAGLTMASLEPEGS

SEQ ID NO: 4586 - protein, 95 aa, Thermosynechococcus elongatus
ASVVPQERQQDTRKHYPNYKVIVLNDDFNTFRHVAACLMKYIPNMTSDRAWELTNQVHYEGQAIVWVGPQVQAELYHEQLLRAGLTIATLEPGGS

SEQ ID NO: 4587 - protein, 95 aa, Thermosynechococcus elongatus
ASVVPQERQQDTRKHYPNYKVIVLNDDFNTFRHVAACLMKYIPNMTSDRAWELTNQVHYEGQAIVWVGPQVQAELYHEQLLRAGLTISPLEPGGS

SEQ ID NO: 4588 - protein, 95 aa, Thermosynechococcus elongatus
ASVVPQERQQDTRKHYPNYKVIVLNDDFNTFRHVAACLMKYIPNMTSDRAWELTNQVHYEGQAIVWVGPQVQAELYHEQLLRAGLAMAPLEPGGS

SEQ ID NO: 4589 - protein, 95 aa, Thermosynechococcus elongatus
ASVVPQERQQDTRKHYPNYKVIVLNDDFNTFRHVAACLMKYIPNMTSDRAWELTNQVHYEGQAIVWVGPQVQAELYHEQLLRAGLSMAPLEPGGS

SEQ ID NO: 4590 - protein, 95 aa, Thermosynechococcus elongatus
ASVVPQERQQDTRKHYPNYKVIVLNDDFNTFRHVAACLMKYIPNMTSDRAWELTNQVHYEGQAIVWVGPQVQAELYHEQLLRAGFTMAPLEPGGS

SEQ ID NO: 4591 - protein, 95 aa, Thermosynechococcus elongatus
ASVVPQERQQDTRKHYPNYKVIVLNDDFNTFRHVAACLMKYIPNMTSDRAWELTNQVHYEGQAIVWVGPQVQAELYHEQLLRACLTMAPLEPGGS

SEQ ID NO: 4592 - protein, 95 aa, Thermosynechococcus elongatus
ASVVPQERQQDTRKHYPNYKVIVLNDDFNTFRHVAACLMKYIPNMTSDRAWELTNQVHYEGQAIVWVGPQVQAELYHEHLLRAGLTMAPLEPEGS

SEQ ID NO: 4593 - protein, 95 aa, Thermosynechococcus elongatus; identical to SEQ ID NO: 3704

SEQ ID NO: 4594 - protein, 95 aa, Thermosynechococcus elongatus; identical to SEQ ID NO: 1001

SEQ ID NO: 4595 - protein, 95 aa, Thermosynechococcus elongatus; identical to SEQ ID NO: 7

SEQ ID NO: 4596 - protein, 95 aa, Thermosynechococcus elongatus
ASVVPQERQQDTRKHYPNYKVIVLNDDFNTFRHVAACLMKYIPNMTSDRAWELTNQVHYEGQAIVWVGPQVQAELYPEQLLRAGLTMAPLEPGGS

SEQ ID NO: 4597 - protein, 95 aa, Thermosynechococcus elongatus
ASVVPQERQQDTRKHYPNYKVIVLNDDFNTFRHVAACLMKYIPNMTSDRAWELTNQVHYEGQAIVWVGPQVQADLYHEQLLRAGLTMAPLEPGGS

SEQ ID NO: 4598 - protein, 95 aa, Thermosynechococcus elongatus; identical to SEQ ID NO: 7

SEQ ID NO: 4599 - protein, 95 aa, Thermosynechococcus elongatus
ASVVPQERQQDTRKHYPNYKVIVLNDDFNTFRHVAACLMKYIPNMTSDRAWELTNQVHYEGQAIVWVGPQVQAGLYHEQLLRAGLTMAPLEPGGS

SEQ ID NO: 4600 - protein, 95 aa, Thermosynechococcus elongatus
ASVVPQERQQDTRKHYPNYKVIVLNDDFNTFRHVAACLMKYIPNMTSDRAWELTNQVHYEGQAIVWVGPQVRAELYHEQLLRAGLTMAPLEPGGS

SEQ ID NO: 4601 - protein, 70 aa, Thermosynechococcus elongatus; identical to SEQ ID NO: 480

SEQ ID NO: 4602 - protein, 70 aa, Thermosynechococcus elongatus; identical to SEQ ID NO: 480

SEQ ID NO: 4603 - protein, 95 aa, Thermosynechococcus elongatus
ASVVPQERQQDTRKHYPNYKVIVLNDDFNTFRHVAACLMKYIPNMTSDRAWELTNQVHYEGQAIVWVGPHEHAELYHEQLLRAGLTMAPLEPEGS

SEQ ID NO: 4604 - protein, 95 aa, Thermosynechococcus elongatus
ASVVPQERQQDTRKHYPNYKVIVLNDDFNTFRHVAACLMKYIPNMTSDRAWELTNQVHYEGQAIVWVGPHAQAELYPEQLLRAGLTMAPLEPEGS

SEQ ID NO: 4605 - protein, 95 aa, Thermosynechococcus elongatus
ASVVPQERQQDTRKHYPNYKVIVLNDDFNTFRHVAACLMKYIPNMTSDRAWELTNQVHYEGQAIVWVGPHEQAELYHEQLLRAGLTMAPLEPEGS

SEQ ID NO: 4606 - protein, 95 aa, Thermosynechococcus elongatus
ASVVPQERQQDTRKHYPNYKVIVLNDDFNTFRHVAACLMKYIPNMTSDRAWELTNQVHYEGQAIVWVGPHVQAELYHEQLLRAGLTMAPLEPGGS

SEQ ID NO: 4607 - protein, 95 aa, Thermosynechococcus elongatus
ASVVPQERQQDTRKHYPNYKVIVLNDDFNTFRHVAACLMKYIPNMTSDRAWELTNQVHYEGQAIVWVGPPEQAELYHEQLLRAGLTMAPLEPEGS

SEQ ID NO: 4608 - protein, 95 aa, Thermosynechococcus elongatus
ASVVPQERQQDTRKHYPNYKVIVLNDDFNTFRHVAACLMKYIPNMTSDRAWELTNQVHYEGQAIVWVGPPEPAELYHEQLLRAGLTMAPLEPEGS

SEQ ID NO: 4609 - protein, 95 aa, Thermosynechococcus elongatus
ASVVPQERQQDTRKHYPNYKVIVLNDDFNTFRHVAACLMKYIPNMTSDRAWELTNQVHYEGQAIVWVGPREQAELYHEQLLRAGLTMAPLEQEGS

SEQ ID NO: 4610 - protein, 95 aa, Thermosynechococcus elongatus; identical to SEQ ID NO: 1002

SEQ ID NO: 4611 - protein, 95 aa, Thermosynechococcus elongatus
ASVVPQERQQDTRKHYPNYKVIVLNDDFNTFRHVAACLMKYIPNMTSDRAWELTNQVHYEGQAIVWVGPLEQAELYHEQLLRAGLTMAPLEPEGS

SEQ ID NO: 4612 - protein, 95 aa, Thermosynechococcus elongatus
ASVVPQERQQDTRKHYPNYKVIVLNDDFNTFRHVAACLMKYIPNMTSDRAWELTNQVHYEGQAIVWVGPEEQAELYHEQLLRAGLTMAPLEPEGS

SEQ ID NO: 4613 - protein, 69 aa, Thermosynechococcus elongatus
ASVVPQERQQDTRKHYPNYKVIVLNDDFNTFRHVAACLMKYIPNMTSDRAWELTNQVHYEGQAIVWVGP

SEQ ID NO: 4614 - protein, 95 aa, Thermosynechococcus elongatus; identical to SEQ ID NO: 2

SEQ ID NO: 4615 - protein, 95 aa, Thermosynechococcus elongatus
ASVVPQERQQDTRKHYPNYKVIVLNDDFNTFRHVAACLMKYIPNMTSDRAWELTNQVHYEGQAIVWVGPQEQAELFHEHLLRAGLTLAPLEREGS

SEQ ID NO: 4616 - protein, 95 aa, Thermosynechococcus elongatus; identical to SEQ ID NO: 731

SEQ ID NO: 4617 - protein, 95 aa, Thermosynechococcus elongatus
ASVVPQERQQDTRKHYPNYKVIVLNDDFNTFRHVAACLMKYIPNMTSDRAWELTNQVHYEGQAIVWVGPQVQAELYLELLLRAGLTMAPLEPGGS

SEQ ID NO: 4618 - protein, 95 aa, Thermosynechococcus elongatus; identical to SEQ ID NO: 2298

SEQ ID NO: 4619 - protein, 95 aa, Thermosynechococcus elongatus
ASVVPQERQQDTRKHYPNYKVIVLNDDFNTFRHVAACLMKYIPNMTSDRAWELTNQVHYEGQAIVWVGSQEQAELYHEQLLRAGLTMAPLEPEGS

SEQ ID NO: 4620 - protein, 95 aa, Thermosynechococcus elongatus
ASVVPQERQQDTRKHYPNYKVIVLNDDFNTFRHVAACLMKYIPNMTSDRAWELTNQVHYEGQAIVWVGSQVQAELYHEQLLRAGLTMAPLEPGGS

SEQ ID NO: 4621 - protein, 95 aa, Thermosynechococcus elongatus
ASVVPQERQQDTRKHYPNYKVIVLNDDFNTFRHVAACLMKYIPNMTSDRAWELTNQVHYEGQAIVWVVPQEQAELYHEQLLRAGLTMAPLEPEGS

SEQ ID NO: 4622 - protein, 95 aa, Thermosynechococcus elongatus
ASVVPQERQQDTRKHYPNYKVIVLNDDFNTFRHVAACLMKYIPNMTSDRAWELTNQVHYEGQAIVWFGPQEQAELYHEQLLRAGLTMAPLEPEGS

SEQ ID NO: 4623 - protein, 95 aa, Thermosynechococcus elongatus
ASVVPQERQQDTRKHYPNYKVIVLNDDFNTFRHVAACLMKYIPNMTSDRAWELTNQVHYEGQAIVWFGPQVQAELYHEQLLRAGFTMAPLEPGGS

SEQ ID NO: 4624 - protein, 95 aa, Thermosynechococcus elongatus
ASVVPQERQQDTRKHYPNYKVIVLNDDFNTFRHVAACLMKYIPNMTSDRAWELTNQVHYEGQAIVCVCPQEQAELYHEQLLRAGLTMAPLEPEGS

SEQ ID NO: 4625 - protein, 95 aa, Thermosynechococcus elongatus; identical to SEQ ID NO: 187

SEQ ID NO: 4626 - protein, 95 aa, Thermosynechococcus elongatus
ASVVPQERQQDTRKHYPNYKVIVLNDDFNTFRHVAACLMKYIPNMTSDRAWELTNQVHYEGQAIVLVGPQEQAELYHEQLLRAGLTMAPLEPGGS

SEQ ID NO: 4627 - protein, 95 aa, Thermosynechococcus elongatus
ASVVPQERQQDTRKHYPNYKVIVLNDDFNTFRHVAACLMKYIPNMTSDRAWELTNQVHYEGQAIFWVGPQEQAELYHEQFLRAGLTMAPLEPEGS

SEQ ID NO: 4628 - protein, 95 aa, Thermosynechococcus elongatus
ASVVPQERQQDTRKHYPNYKVIVLNDDFNTFRHVAACLMKYIPNMTSDRAWELTNQVHYEGQAVVWVGPQEQAELYHEQLLRAGLTMAPLEPEGS

SEQ ID NO: 4629 - protein, 95 aa, Thermosynechococcus elongatus
ASVVPQERQQDTRKHYPNYKVIVLNDDFNTFRHVAACLMKYIPNMTSDRAWELTNQVHYEGQVIVWVGPQEQAELYHEQLLRAGLTMAPLEPEGS

SEQ ID NO: 4630 - protein, 95 aa, Thermosynechococcus elongatus
ASVVPQERQQDTRKHYPNYKVIVLNDDFNTFRHVAACLMKYIPNMTSDRAWELTNQVHYEGQSIVWVGPQEQAELYHEQLLSAGLSMAPLEPEGS

SEQ ID NO: 4631 - protein, 70 aa, Thermosynechococcus elongatus
ASVVPQERQQDTRKHYPNYKVIVLNDDFNTFRHVAACLMKYIPNMTSDRAWELTNQVHYEGQSIVWVGPQ

SEQ ID NO: 4632 - protein, 95 aa, Thermosynechococcus elongatus
ASVVPQERQQDTRKHYPNYKVIVLNDDFNTFRHVAACLMKYIPNMTSDRAWELTNQVHYEGQSIVWVGPQEQAELYHEQLLRAGLTIAPLEPEGS

SEQ ID NO: 4633 - protein, 77 aa, Thermosynechococcus elongatus
ASVVPQERQQDTRKHYPNYKVIVLNDDFNTFRHVAACLMKYIPNMTSDRAWELTNQVHYEGQSIVWVGPQEQAELYH

SEQ ID NO: 4634 - protein, 95 aa, Thermosynechococcus elongatus
ASVVPQERQQDTRKHYPNYKVIVLNDDFNTFRHVAACLMKYIPNMTSDRAWELTNQVHYEGQSIVWVGPQEQAVLYHDQLLRAGLTMAPLEPEGS

SEQ ID NO: 4635 - protein, 95 aa, Thermosynechococcus elongatus
ASVVPQERQQDTRKHYPNYKVIVLNDDFNTFRHVAACLMKYIPNMTSDRAWELTNQVHYEGHAIVWVGPQEQAELYHEQLLRAGLTMAPLEPEGS

SEQ ID NO: 4636 - protein, 95 aa, Thermosynechococcus elongatus; identical to SEQ ID NO: 4635

SEQ ID NO: 4637 - protein, 95 aa, Thermosynechococcus elongatus
ASVVPQERQQDTRKHYPNYKVIVLNDDFNTFRHVAACLMKYIPNMTSDRAWELTNQVHYEGRAIVWVGPQEQAELYHEQLLRAGLTMATLEPEGS

SEQ ID NO: 4638 - protein, 95 aa, Thermosynechococcus elongatus
ASVVPQERQQDTRKHYPNYKVIVLNDDFNTFRHVAACLMKYIPNMTSDRAWELTNQVHYEGRAIVWVGPQEQAELYHEQLLRAGLTMAPLEQEGS

SEQ ID NO: 4639 - protein, 95 aa, Thermosynechococcus elongatus
ASVVPQERQQDTRKHYPNYKVIVLNDDFNTFRHVAACLMKYIPNMTSDRAWELTNQVHYEGRAIVWVGPQEQAELYHEQLLRAGLTMAPLEPGGS

SEQ ID NO: 4640 - protein, 95 aa, Thermosynechococcus elongatus
ASVVPQERQQDTRKHYPNYKVIVLNDDFNTFRHVAACLMKYIPNMTSDRAWELTNQVHYEGRAIVWVCPQEQAELYHEQLLRAGLTMAPLETEGS

SEQ ID NO: 4641 - protein, 95 aa, Thermosynechococcus elongatus
ASVVPQERQQDTRKHYPNYKVIVLNDDFNTFRHVAACLMKYIPNMTSDRAWELTNQVHYEGRAIVCVGPQEQAELYHEQLLRAGLTMAPLEPEGS

SEQ ID NO: 4642 - protein, 95 aa, Thermosynechococcus elongatus
ASVVPQERQQDTRKHYPNYKVIVLNDDFNTFRHVAACLMKYIPNMTSDRAWELTNQVHYEGLAIVWVGPQEQAELYHEQLLRAGLTLAPLEPEGS

SEQ ID NO: 4643 - protein, 95 aa, Thermosynechococcus elongatus
ASVVPQERQQDTRKHYPNYKVIVLNDDFNTFRHVAACLMKYIPNMTSDRAWELTNQVHYEGLAIVWVGPQEQAELFHDHLLRAGLSWAPLEREGS

SEQ ID NO: 4644 - protein, 95 aa, Thermosynechococcus elongatus
ASVVPQERQQDTRKHYPNYKVIVLNDDFNTFRHVAACLMKYIPNMTSDRAWELTNQVHYEGLAIVWVGPQEQAELYHEQLLRAGLTRAPLEPGGS

SEQ ID NO: 4645 - protein, 95 aa, Thermosynechococcus elongatus; identical to SEQ ID NO: 136

SEQ ID NO: 4646 - protein, 95 aa, Thermosynechococcus elongatus
ASVVPQERQQDTRKHYPNYKVIVLNDDFNTFRHVAACLMKYIPNMTSDRAWELTNQVHYEGLAIVWVGPQEQAELYHEQLLRAGLTMAPLEPGGS

SEQ ID NO: 4647 - protein, 95 aa, Thermosynechococcus elongatus
ASVVPQERQQDTRKHYPNYKVIVLNDDFNTFRHVAACLMKYIPNMTSDRAWELTNQVHYEGLAIVWVGPQEQAELYHEQLLRAGLTMAPLDPEGS

SEQ ID NO: 4648 - protein, 95 aa, Thermosynechococcus elongatus; identical to SEQ ID NO: 4642

SEQ ID NO: 4649 - protein, 95 aa, Thermosynechococcus elongatus
ASVVPQERQQDTRKHYPNYKVIVLNDDFNTFRHVAACLMKYIPNMTSDRAWELTNQVHYEGLAIVWVGPQEQAELYHEHLLRAGLTMAPLEPEGS

SEQ ID NO: 4650 - protein, 95 aa, Thermosynechococcus elongatus
ASVVPQERQQDTRKHYPNYKVIVLNDDFNTFRHVAACLMKYIPNMTSDRAWELTNQVHYEGLAIVWVGPQEQAELYHVQLLRAGLTMAPLEPEGS

SEQ ID NO: 4651 - protein, 95 aa, Thermosynechococcus elongatus
ASVVPQERQQDTRKHYPNYKVIVLNDDFNTFRHVAACLMKYIPNMTSDRAWELTNQVHYEGLAIVWVGPQEQAELSHEQLLRAGLTMAPLEPEGS

SEQ ID NO: 4652 - protein, 95 aa, Thermosynechococcus elongatus
ASVVPQERQQDTRKHYPNYKVIVLNDDFNTFRHVAACLMKYIPNMTSDRAWELTNQVHYEGLAIVWVGPQEQAVLYHEQLLRAGLTMAPLEPEGS

SEQ ID NO: 4653 - protein, 95 aa, Thermosynechococcus elongatus
ASVVPQERQQDTRKHYPNYKVIVLNDDFNTFRHVAACLMKYIPNMTSDRAWELTNQVHYEGLAIVWVGPQVQAVLYHELLLRAGLTMAPLEPGGS

SEQ ID NO: 4654 - protein, 95 aa, Thermosynechococcus elongatus
ASVVPQERQQDTRKHYPNYKVIVLNDDFNTFRHVAACLMKYIPNMTSDRAWELTNQVHYEGLAIVWVGPLVQAELYHEQLLRAGLTMAPLEPGGS

SEQ ID NO: 4655 - protein, 95 aa, Thermosynechococcus elongatus
ASVVPQERQQDTRKHYPNYKVIVLNDDFNTFRHVAACLMKYIPNMTSDRAWELTNQVHYEGLAFVWVGPQEQAELYHEQLLSAGLTMAPLEPEGS

SEQ ID NO: 4656 - protein, 95 aa, Thermosynechococcus elongatus
ASVVPQERQQDTRKHYPNYKVIVLNDDFNTFRHVAACLMKYIPNMTSDRAWELTNQVHYEGLGIVWVGPQEQAVFYHEQLLRAGLTMAPLERVGS

SEQ ID NO: 4657 - protein, 95 aa, Thermosynechococcus elongatus
ASVVPQERQQDTRKHYPNYKVIVLNDDFNTFRHVAACLMKYIPNMTSDRAWELTNQVHYEGLSIVWVGPQEQAELYHEQLLRAGLTLAPLEPEGS

SEQ ID NO: 4658 - protein, 61 aa, Thermosynechococcus elongatus; identical to SEQ ID NO: 1008

SEQ ID NO: 4659 - protein, 95 aa, Thermosynechococcus elongatus
ASVVPQERQQDTRKHYPNYKVIVLNDDFNTFRHVAACLMKYIPNMTSDRAWELTNQVHYECQAIVWVGPQVQAELYHEQLLRAGLTMAPLEPGGS

SEQ ID NO: 4660 - protein, 95 aa, Thermosynechococcus elongatus
ASVVPQERQQDTRKHYPNYKVIVLNDDFNTFRHVAACLMKYIPNMTSDRAWELTNQVHYECQAIVWVGPQEQAELYHEQLLRAGLTMAPLEPGGS

SEQ ID NO: 4661 - protein, 95 aa, Thermosynechococcus elongatus
ASVVPQERQQDTRKHYPNYKVIVLNDDFNTFRHVAACLMKYIPNMTSDRAWELTNQVHYECQAIVWVGPQEQAELYHEQLLRAGLTMSPLEPEGS

SEQ ID NO: 4662 - protein, 95 aa, Thermosynechococcus elongatus
ASVVPQERQQDTRKHYPNYKVIVLNDDFNTFRHVAACLMKYIPNMTSDRAWELTNQVHYECQAIVWVGPQEQAELYHEQLLRVGLTMAPLEPEGS

SEQ ID NO: 4663 - protein, 95 aa, Thermosynechococcus elongatus
ASVVPQERQQDTRKHYPNYKVIVLNDDFNTFRHVAACLMKYIPNMTSDRAWELTNQVHYECQAIVWVGPQELAELYHKQLLRAGLTMAPLEPEGS

SEQ ID NO: 4664 - protein, 95 aa, Thermosynechococcus elongatus
ASVVPQERQQDTRKHYPNYKVIVLNDDFNTFRHVAACLMKYIPNMTSDRAWELTNQVHYECQAIVCVGPQEQAELYHEQLLRAGLTMAPLEPEGS

SEQ ID NO: 4665 - protein, 95 aa, Thermosynechococcus elongatus
ASVVPQERQQDTRKHYPNYKVIVLNDDFNTFRHVAACLMKYIPNMTSDRAWELTNQVHYECQSIVWVGPQEQAELYHEQLLRAGLTMAPLEPEGS

SEQ ID NO: 4666 - protein, 95 aa, Thermosynechococcus elongatus
ASVVPQERQQDTRKHYPNYKVIVLNDDFNTFRHVAACLMKYIPNMTSDRAWELTNQVHYECLSIVWVGPQVQAELFHEHLLRAGLSMAPLEPGGS

SEQ ID NO: 4667 - protein, 95 aa, Thermosynechococcus elongatus
ASVVPQERQQDTRKHYPNYKVIVLNDDFNTFRHVAACLMKYIPNMTSDRAWELTNQVHYDGQAIVWVGPQEQAELYHAQLMRAGLTMAPLEPEGS

SEQ ID NO: 4668 - protein, 95 aa, Thermosynechococcus elongatus; identical to SEQ ID NO: 2

SEQ ID NO: 4669 - protein, 95 aa, Thermosynechococcus elongatus
ASVVPQERQQDTRKHYPNYKVIVLNDDFNTFRHVAACLMKYIPNMTSDRAWELTNQVHYDGQAIVLVGPQEQAELYHEQLLRAGLTMAPLEPEGS

SEQ ID NO: 4670 - protein, 77 aa, Thermosynechococcus elongatus
ASVVPQERQQDTRKHYPNYKVIVLNDDFNTFRHVAACLMKYIPNMTSDRAWELTNQVHYGGRAIVWVGPQVQAELYH

SEQ ID NO: 4671 - protein, 95 aa, Thermosynechococcus elongatus
ASVVPQERQQDTRKHYPNYKVIVLNDDFNTFRHVAACLMKYIPNMTSDRAWELTNQVHYGGQAIVWVGPQVQAELYHEQLLRAGLTMAPLEPEGS

SEQ ID NO: 4672 - protein, 95 aa, Thermosynechococcus elongatus
ASVVPQERQQDTRKHYPNYKVIVLNDDFNTFRHVAACLMKYIPNMTSDRAWELTNQVHYGGQAIVWVGPQVQAELYHEQLLRAGLTMAPLEPGGS

SEQ ID NO: 4673 - protein, 95 aa, Thermosynechococcus elongatus
ASVVPQERQQDTRKHYPNYKVIVLNDDFNTFRHVAACLMKYIPNMTSDRAWELTNQVHYGGQAIVWVGPQVQAELYHEQLLRAGLTIAPLEPGGS

SEQ ID NO: 4674 - protein, 95 aa, Thermosynechococcus elongatus; identical to SEQ ID NO: 28

SEQ ID NO: 4675 - protein, 95 aa, Thermosynechococcus elongatus; identical to SEQ ID NO: 28

SEQ ID NO: 4676 - protein, 95 aa, Thermosynechococcus elongatus
ASVVPQERQQDTRKHYPNYKVIVLNDDFNTFRHVAACLMKYIPNMTSDRAWELTNQVHYGGRAIVRVGPQEQAELYHEQLLRAGLTMAPLEPEGS

SEQ ID NO: 4677 - protein, 95 aa, Thermosynechococcus elongatus; identical to SEQ ID NO: 1582

SEQ ID NO: 4678 - protein, 95 aa, Thermosynechococcus elongatus
ASVVPQERQQDTRKHYPNYKVIVLNDDFNTFRHVAACLMKYIPNMTSDRAWELTNQVHYGGRAIVWVGPQEQAELYHKQLLRAGLTMAPLEPEGS

SEQ ID NO: 4679 - protein, 95 aa, Thermosynechococcus elongatus
ASVVPQERQQDTRKHYPNYKVIVLNDDFNTFRHVAACLMKYIPNMTSDRAWELTNQVHYGGRAIVWVGPQEQAELYHEQLLRDGLTMAPLEPEGS

SEQ ID NO: 4680 - protein, 95 aa, Thermosynechococcus elongatus; identical to SEQ ID NO: 28

SEQ ID NO: 4681 - protein, 92 aa, Thermosynechococcus elongatus
ASVVPQERQQDTRKHYPNYKVIVLNDDFNTFRHVAACLMKYIPNMTSDRAWELTNQVHYGGRAIVWVGPQEQAELYHEQLLRAGLTMAPLEP

SEQ ID NO: 4682 - protein, 95 aa, Thermosynechococcus elongatus
ASVVPQERQQDTRKHYPNYKVIVLNDDFNTFRHVAACLMKYIPNMTSDRAWELTNQVHYGGRAIVWVGPQEQAELYHEQLLRAGLTMAPLEPKGS

SEQ ID NO: 4683 - protein, 95 aa, Thermosynechococcus elongatus
ASVVPQERQQDTRKHYPNYKVIVLNDDFNTFRHVAACLMKYIPNMTSDRAWELTNQVHYGGRAIVWVGPQEQAELYHEQLLRAGLTMAPFEPGGS

SEQ ID NO: 4684 - protein, 90 aa, Thermosynechococcus elongatus
ASVVPQERQQDTRKHYPNYKVIVLNDDFNTFRHVAACLMKYIPNMTSDRAWELTNQVHYGGRAIVWVGPQEQAELYHEQLLRAGLTMSPL

SEQ ID NO: 4685 - protein, 95 aa, Thermosynechococcus elongatus
ASVVPQERQQDTRKHYPNYKVIVLNDDFNTFRHVAACLMKYIPNMTSDRAWELTNQVHYGGRAIVWVGPQEQAELYHELLLRAGLTMAPLEPEGS

SEQ ID NO: 4686 - protein, 75 aa, Thermosynechococcus elongatus
ASVVPQERQQDTRKHYPNYKVIVLNDDFNTFRHVAACLMKYIPNMTSDRAWELTNQVHYGGRAIVWVGPQEQAEL

SEQ ID NO: 4687 - protein, 95 aa, Thermosynechococcus elongatus
ASVVPQERQQDTRKHYPNYKVIVLNDDFNTFRHVAACLMKYIPNMTSDRAWELTNQVHYGGRAIVWVGPQEQAELSHEQLLRAGLTMAPLEPKGS

SEQ ID NO: 4688 - protein, 95 aa, Thermosynechococcus elongatus
ASVVPQERQQDTRKHYPNYKVIVLNDDFNTFRHVAACLMKYIPNMTSDRAWELTNQVHYGGRAIVWVGPQELAELYQEQLLRAGLTMAPLEPEGS

SEQ ID NO: 4689 - protein, 95 aa, Thermosynechococcus elongatus
ASVVPQERQQDTRKHYPNYKVIVLNDDFNTFRHVAACLMKYIPNMTSDRAWELTNQVHYGGRAIVWVCPQEQAELYHEQLLRAGLTMAPLEPEGS

SEQ ID NO: 4690 - protein, 95 aa, Thermosynechococcus elongatus
ASVVPQERQQDTRKHYPNYKVIVLNDDFNTFRHVAACLMKYIPNMTSDRAWELTNQVHYGGRSIVWVGPQEQAELNHEQLLRAGLTMAPLEPEGS

SEQ ID NO: 4691 - protein, 95 aa, Thermosynechococcus elongatus
ASVVPQERQQDTRKHYPNYKVIVLNDDFNTFRHVAACLMKYIPNMTSDRAWELTNQVHYGGRSIVWVGPQEQAELYHEQLLRAGLTMAPLEPEGS

SEQ ID NO: 4692 - protein, 95 aa, Thermosynechococcus elongatus
ASVVPQERQQDTRKHYPNYKVIVLNDDFNTFRHVAACLMKYIPNMTSDRAWELTNQVHYGGLAIVWVGPPEQAELYHEQLLRAGLTMAPLEPEGS

SEQ ID NO: 4693 - protein, 95 aa, Thermosynechococcus elongatus
ASVVPQERQQDTRKHYPNYKVIVLNDDFNTFRHVAACLMKYIPNMTSDRAWELTNQVHYVGQAIVWVGTQEQAELYHELLLRAGLTMAPLEPEGS

SEQ ID NO: 4694 - protein, 95 aa, Thermosynechococcus elongatus
ASVVPQERQQDTRKHYPNYKVIVLNDDFNTFRHVAACLMKYIPNMTSDRAWELTNQVHYVGQAIVWVGPQEQAELYHEQLLRAGLTMAPLEPGGS

SEQ ID NO: 4695 - protein, 95 aa, Thermosynechococcus elongatus
ASVVPQERQQDTRKHYPNYKVIVLNDDFNTFRHVAACLMKYIPNMTSDRAWELTNQVHYVGQAIVWVGPQEQAELYHEQLLRAGLTLAPLEPEGS

SEQ ID NO: 4696 - protein, 95 aa, Thermosynechococcus elongatus
ASVVPQERQQDTRKHYPNYKVIVLNDDFNTFRHVAACLMKYIPNMTSDRAWELTNQVHYVGQAIVWVGPQEQAELYHEPLLRAGLTMAPLEPEGS

SEQ ID NO: 4697 - protein, 95 aa, Thermosynechococcus elongatus
ASVVPQERQQDTRKHYPNYKVIVLNDDFNTFRHVAACLMKYIPNMTSDRAWELTNQVHYVGQAIVWVGPQEQAVLYHEQLLRAGLTMAPLEPEGS

SEQ ID NO: 4698 - protein, 95 aa, Thermosynechococcus elongatus
ASVVPQERQQDTRKHYPNYKVIVLNDDFNTFRHVAACLMKYIPNMTSDRAWELTNQVHYVGQAIVWVGPQVQAELYHDQLLSAGLTLAPLEAGGS

SEQ ID NO: 4699 - protein, 95 aa, Thermosynechococcus elongatus
ASVVPQERQQDTRKHYPNYKVIVLNDDFNTFRHVAACLMKYIPNMTSDRAWELTNQVHYVGQAIVCVGPQERAELYHEQFLRAGLTMAQLEPEGS

SEQ ID NO: 4700 - protein, 95 aa, Thermosynechococcus elongatus
ASVVPQERQQDTRKHYPNYKVIVLNDDFNTFRHVAACLMKYIPNMTSDRAWELTNQVHYVGQSIVWFGPQEQAELYLVHLLSACLTMAPLEPEGS

SEQ ID NO: 4701 - protein, 95 aa, Thermosynechococcus elongatus
ASVVPQERQQDTRKHYPNYKVIVLNDDFNTFRHVAACLMKYIPNMTSDRAWELTNQVHYVGLAIVWVGPQEQAELYHEQLLRAGLTRAPLEPGGS

SEQ ID NO: 4702 - protein, 95 aa, Thermosynechococcus elongatus
ASVVPQERQQDTRKHYPNYKVIVLNDDFNTFRHVAACLMKYIPNMTSDRAWELTNQVHYVGLAIVWVGPQEQAELYHEQLLRAGLTMAPLEPEGS

SEQ ID NO: 4703 - protein, 95 aa, Thermosynechococcus elongatus; identical to SEQ ID NO: 4702

SEQ ID NO: 4704 - protein, 95 aa, Thermosynechococcus elongatus
ASVVPQERQQDTRKHYPNYKVIVLNDDFNTFRHVAACLMKYIPNMTSDRAWELTNQVHYVGLAIVWVGPLEQAELYHEQLLRAGLSMAPLEPEGS

SEQ ID NO: 4705 - protein, 59 aa, Thermosynechococcus elongatus; identical to SEQ ID NO: 736

SEQ ID NO: 4706 - protein, 59 aa, Thermosynechococcus elongatus; identical to SEQ ID NO: 736

SEQ ID NO: 4707 - protein, 59 aa, Thermosynechococcus elongatus; identical to SEQ ID NO: 736

SEQ ID NO: 4708 - protein, 59 aa, Thermosynechococcus elongatus; identical to SEQ ID NO: 736

SEQ ID NO: 4709 - protein, 58 aa, Thermosynechococcus elongatus; identical to SEQ ID NO: 569

SEQ ID NO: 4710 - protein, 95 aa, Thermosynechococcus elongatus; identical to SEQ ID NO: 2

SEQ ID NO: 4711 - protein, 95 aa, Thermosynechococcus elongatus
ASVVPQERQQDTRKHYPNYKVIVLNDDFNTFRHVAACLMKYIPNMTSDRAWELTNQVHSEGQAIVWVGPQEQAELYHEQLLRAGLTMAPLEPEGS

SEQ ID NO: 4712 - protein, 95 aa, Thermosynechococcus elongatus; identical to SEQ ID NO: 4711

SEQ ID NO: 4713 - protein, 95 aa, Thermosynechococcus elongatus
ASVVPQERQQDTRKHYPNYKVIVLNDDFNTFRHVAACLMKYIPNMTSDRAWELTNQVHCEGQAIVWVGPQEQAELYHEQLLRTGLTMAPLEPEGS

SEQ ID NO: 4714 - protein, 95 aa, Thermosynechococcus elongatus
ASVVPQERQQDTRKHYPNYKVIVLNDDFNTFRHVAACLMKYIPNMTSDRAWELTNQVHFEGQAIVWVGPQEQAELYQEQLLRAGLTMAPLEPEGS

SEQ ID NO: 4715 - protein, 95 aa, Thermosynechococcus elongatus; identical to SEQ ID NO: 1013

SEQ ID NO: 4716 - protein, 95 aa, Thermosynechococcus elongatus
ASVVPQERQQDTRKHYPNYKVIVLNDDFNTFRHVAACLMKYIPNMTSDRAWELTNQVHFEGQAIVWVGPQVQAELYHEQLLRAGLTMAPLEPGGS

SEQ ID NO: 4717 - protein, 95 aa, Thermosynechococcus elongatus
ASVVPQERQQDTRKHYPNYKVIVLNDDFNTFRHVAACLMKYIPNMTSDRAWELTNQVHFEGQAIVWVGPQEQAELYHEQLLRAGLTMAPLEPGGS

SEQ ID NO: 4718 - protein, 95 aa, Thermosynechococcus elongatus
ASVVPQERQQDTRKHYPNYKVIVLNDDFNTFRHVAACLMKYIPNMTSDRAWELTNQVHFEGQAIVWVGPQEQAELYHEQLLRAGLTMAPLEPVGS

SEQ ID NO: 4719 - protein, 95 aa, Thermosynechococcus elongatus
ASVVPQERQQDTRKHYPNYKVIVLNDDFNTFRHVAACLMKYIPNMTSDRAWELTNQVHFEGQAIVWVGPQEQAELYHEHLLRAGLTMAPLEPGGS

SEQ ID NO: 4720 - protein, 95 aa, Thermosynechococcus elongatus
ASVVPQERQQDTRKHYPNYKVIVLNDDFNTFRHVAACLMKYIPNMTSDRAWELTNQVHFEGLAIVWVGPQEQAELYHEQLLRAGLTLAPLEPEGS

SEQ ID NO: 4721 - protein, 95 aa, Thermosynechococcus elongatus
ASVVPQERQQDTRKHYPNYKVIVLNDDFNTFRHVAACLMKYIPNMTSDRAWELTNQVHFEGLSIVWVGPQEQAELYHEQLLRAGLTMAPLEPEGS

SEQ ID NO: 4722 - protein, 95 aa, Thermosynechococcus elongatus
ASVVPQERQQDTRKHYPNYKVIVLNDDFNTFRHVAACLMKYIPNMTSDRAWELTNQVHFDGQAIVWVGPQEQAELYHVQLLRAGLTLAPLEPEGS

SEQ ID NO: 4723 - protein, 95 aa, Thermosynechococcus elongatus
ASVVPQERQQDTRKHYPNYKVIVLNDDFNTFRHVAACLMKYIPNMTSDRAWELTNQVHFVGQAIVWVGPQEQAELYHEQLLRAGLTLAPLEPGGS

SEQ ID NO: 4724 - protein, 95 aa, Thermosynechococcus elongatus
ASVVPQERQQDTRKHYPNYKVIVLNDDFNTFRHVAACLMKYIPNMTSDRAWELTNQVHFVGQAIVWVGPQEQAELYHEQLLRAGLTLAPLEPEGS

SEQ ID NO: 4725 - protein, 59 aa, Thermosynechococcus elongatus
ASVVPQERQQDTRKHYPNYKVIVLNDDFNTFRHVAACLMKYIPNMTSDRAWELTNQVHF

SEQ ID NO: 4726 - protein, 95 aa, Thermosynechococcus elongatus
ASVVPQERQQDTRKHYPNYKVIVLNDDFNTFRHVAACLMKYIPNMTSDRAWELTNQVHFLGQAIVWVGPQEQAELYHEQLLRAGLTMAPLVPEGS

SEQ ID NO: 4727 - protein, 95 aa, Thermosynechococcus elongatus
ASVVPQERQQDTRKHYPNYKVIVLNDDFNTFRHVAACLMKYIPNMTSDRAWELTNQVHYEGQATVWVGPQEQAELYHEQLLRAGLTMAPLEPEGS

SEQ ID NO: 4728 - protein, 95 aa, Thermosynechococcus elongatus
ASVVPQERQQDTRKHYPNYKVIVLNDDFNTFRHVAACLMKYIPNMTSDRAWELTNQVLYEGQAIVWVGPQVQAELYHEQLLRAGLTMAPLEPEGS

SEQ ID NO: 4729 - protein, 95 aa, Thermosynechococcus elongatus
ASVVPQERQQDTRKHYPNYKVIVLNDDFNTFRHVAACLMKYIPNMTSDRAWELTNQVLYEGQAIVWVGPQEQAELYHEQLLRAGLTMAPLEPEGS

SEQ ID NO: 4730 - protein, 95 aa, Thermosynechococcus elongatus
ASVVPQERQQDTRKHYPNYKVIVLNDDFNTFRHVAACLMKYIPNMTSDRAWELTNQVLYEGQAIVWVGPQEQAELYHEQLLRAGLTMAPLEPGGS

SEQ ID NO: 4731 - protein, 95 aa, Thermosynechococcus elongatus
ASVVPQERQQDTRKHYPNYKVIVLNDDFNTFRHVAACLMKYIPNMTSDRAWELTNQVLYEGLAIVWVGPQEQAELYHEQLLRAGLTMAPLEPEGS

SEQ ID NO: 4732 - protein, 95 aa, Thermosynechococcus elongatus
ASVVPQERQQDTRKHYPNYKVIVLNDDFNTFRHVAACLMKYIPNMTSDRAWELTNQVLFEGQAIVWVGPQEQAELYHEQLLRAGLTMAPLEPEGS

SEQ ID NO: 4733 - protein, 95 aa, Thermosynechococcus elongatus; identical to SEQ ID NO: 1588

SEQ ID NO: 4734 - protein, 95 aa, Thermosynechococcus elongatus
ASVVPQERQQDTRKHYPNYKVIVLNDDFNTFRHVAACLMKYIPNMTSDRAWELTNQVYYKGQAIVWVGPQEQAELNHEQLLRAGLTMAPLEPEGS

SEQ ID NO: 4735 - protein, 58 aa, Thermosynechococcus elongatus
ASVVPQERQQDTRKHYPNYKVIVLNDDFNTFRHVAACLMKYIPNMTSDRAWELTNQFH

SEQ ID NO: 4736 - protein, 95 aa, Thermosynechococcus elongatus
ASVVPQERQQDTRKHYPNYKVIVLNDDFNTFRHVAACLMKYIPNMTSDRAWELTNQFHYKGQAIVWVGPQEQAELNHEQLLRAGLTMAPLEPEGS

SEQ ID NO: 4737 - protein, 95 aa, Thermosynechococcus elongatus
ASVVPQERQQDTRKHYPNYKVIVLNDDFNTFRHVAACLMKYIPNMTSDRAWELTNQFHYEGQAIVWVGPREQAELYHEQLLRVGLTMAPLEPEGS

SEQ ID NO: 4738 - protein, 95 aa, Thermosynechococcus elongatus
ASVVPQERQQDTRKHYPNYKVIVLNDDFNTFRHVAACLMKYIPNMTSDRAWELTNQFHYEGQSIVLVGPQEQAELFPEQLLRAGLTMAPLEPEGS

SEQ ID NO: 4739 - protein, 95 aa, Thermosynechococcus elongatus
ASVVPQERQQDTRKHYPNYKVIVLNDDFNTFRHVAACLMKYIPNMTSDRAWELTNQFHYECQAIVWVGPQEQAELYHEHLLRAGLTLASLEPEGS

SEQ ID NO: 4740 - protein, 95 aa, Thermosynechococcus elongatus
ASVVPQERQQDTRKHYPNYKVIVLNDDFNTFRHVAACLMKYIPNMTSDRAWELTNQFHYVGQAIVWVGPQEQAELYHEQLLRAGLTMAPLEPEGS

SEQ ID NO: 4741 - protein, 95 aa, Thermosynechococcus elongatus
ASVVPQERQQDTRKHYPNYKVIVLNDDFNTFRHVAACLMKYIPNMTSDRAWELTNQFHFEGLSIVWVGPQEEAELFHDHLLRAGLTMAPLVREGS

SEQ ID NO: 4742 - protein, 70 aa, Thermosynechococcus elongatus
ASVVPQERQQDTRKHYPNYKVIVLNDDFNTFRHVAACLMKYIPNMTSDRAWELTNQFLYEGLAIFWVVPQ

SEQ ID NO: 4743 - protein, 95 aa, Thermosynechococcus elongatus
ASVVPQERQQDTRKHYPNYKVIVLNDDFNTFRHVAACLMKYIPNMTSDRAWELTNHVHDEGQAIVWVGPQEQAELYPEQLLRAGLTMAPLEPEGS

SEQ ID NO: 4744 - protein, 95 aa, Thermosynechococcus elongatus
ASVVPQERQQDTRKHYPNYKVIVLNDDFNTFRHVAACLMKYIPNMTSDRAWELTNHVHYEGQAIVWVGPQDQAELYHAPLLRAGLTMAPLEPEGS

SEQ ID NO: 4745 - protein, 95 aa, Thermosynechococcus elongatus
ASVVPQERQQDTRKHYPNYKVIVLNDDFNTFRHVAACLMKYIPNMTSDRAWELTNHCHYEGQAIVWVGPQEQAELYHEQLLRAGLTMAPLEPEGS

SEQ ID NO: 4746 - protein, 95 aa, Thermosynechococcus elongatus
ASVVPQERQQDTRKHYPNYKVIVLNDDFNTFRHVAACLMKYIPNMTSDRAWELTNHVHYEGQAIVWVGPQEQAELYHEHLLRAVLTLAPLEPEGS

SEQ ID NO: 4747 - protein, 95 aa, Thermosynechococcus elongatus
ASVVPQERQQDTRKHYPNYKVIVLNDDFNTFRHVAACLMKYIPNMTSDRAWELTNHVHYEGQAIVWVGPQEQAELYHEQLLSAGLTMAPLEPEGS

SEQ ID NO: 4748 - protein, 95 aa, Thermosynechococcus elongatus
ASVVPQERQQDTRKHYPNYKVIVLNDDFNTFRHVAACLMKYIPNMTSDRAWELTNHVHYEGQAIVWVGPQEQAELYHEHLLRAGLTMAPLEPEGS

SEQ ID NO: 4749 - protein, 95 aa, Thermosynechococcus elongatus
ASVVPQERQQDTRKHYPNYKVIVLNDDFNTFRHVAACLMKYIPNMTSDRAWELTNHVHYEGQAIVWVGPQEQAVLYHEQLLRAGLTMATLEPEGS

SEQ ID NO: 4750 - protein, 95 aa, Thermosynechococcus elongatus
ASVVPQERQQDTRKHYPNYKVIVLNDDFNTFRHVAACLMKYIPNMTSDRAWELTNHVHYEGQAIVWVGPQVQAELYHEQLLRAGLTMAPLEPGGS

SEQ ID NO: 4751 - protein, 95 aa, Thermosynechococcus elongatus
ASVVPQERQQDTRKHYPNYKVIVLNDDFNTFRHVAACLMKYIPNMTSDRAWELTNHVHYEGLSIVWVGPQEQAEFYQEQLLRAGLTMAQLEPEGS

SEQ ID NO: 4752 - protein, 95 aa, Thermosynechococcus elongatus
ASVVPQERQQDTRKHYPNYKVIVLNDDFNTFRHVAACLMKYIPNMTSDRAWELTNHVLFEVLDIVFFGPQVLGEFYQEVLLRGGLTRAQLDPEGS

SEQ ID NO: 4753 - protein, 95 aa, Thermosynechococcus elongatus
ASVVPQERQQDTRKHYPNYKVIVLNDDFNTFRHVAACLMKYIPNMTSDRAWELTNPVHYEGQAIVWVGPQEQAELYHEQLLRAGLTMAPLEPEGS

SEQ ID NO: 4754 - protein, 95 aa, Thermosynechococcus elongatus
ASVVPQERQQDTRKHYPNYKVIVLNDDFNTFRHVAACLMKYIPNMTSDRAWELTNLVHYEGQAIVWVGPQEQAELYHEQLLRTGLTMAPLEPEGS

SEQ ID NO: 4755 - protein, 95 aa, Thermosynechococcus elongatus; identical to SEQ ID NO: 1016

SEQ ID NO: 4756 - protein, 95 aa, Thermosynechococcus elongatus
ASVVPQERQQDTRKHYPNYKVIVLNDDFNTFRHVAACLMKYIPNMTSDRAWELTNLVHYEGQAIVWVGPHVQAELYHEQLLRAGLTMAPLEPGGS

SEQ ID NO: 4757 - protein, 95 aa, Thermosynechococcus elongatus
ASVVPQERQQDTRKHYPNYKVIVLNDDFNTFRHVAACLMKYIPNMTSDRAWELTNLVHYEGQAIVWVGPQVQADLYHEQLLRAGLTLAKLDPVGS

SEQ ID NO: 4758 - protein, 95 aa, Thermosynechococcus elongatus
ASVVPQERQQDTRKHYPNYKVIVLNDDFNTFRHVAACLMKYIPNMTSDRAWELTNEVHYKGQAIVWVGPQEQAELNHEQLLRAGLTMAPLEPEGS

SEQ ID NO: 4759 - protein, 95 aa, Thermosynechococcus elongatus
ASVVPQERQQDTRKHYPNYKVIVLNDDFNTFRHVAACLMKYIPNMTSDRAWELTNEVHYEGQAIVWVGPQEQAELYHEQLLRAGLTMAPLEPEGS

SEQ ID NO: 4760 - protein, 95 aa, Thermosynechococcus elongatus
ASVVPQERQQDTRKHYPNYKVIVLNDDFNTFRHVAACLMKYIPNMTSDRAWELTNQVHYKGQATVWVGPQKQAELYHEQLLRAGLTMAPLEPEGS

SEQ ID NO: 4761 - protein, 95 aa, Thermosynechococcus elongatus
ASVVPQERQQDTRKHYPNYKVIVLNDDFNTFRHVAACLMKYIPNMTSDRAWELTNQVHYKGQATVWVGPQKQAELYHEQLLRAGLTMAPLELEGS

SEQ ID NO: 4762 - protein, 95 aa, Thermosynechococcus elongatus
ASVVPQERQQDTRKHYPNYKVIVLNDDFNTFRHVAACLMKYIPNMTSDRAWELTHHVHYDGQAIVWVGPQEQAELYHEQLLRAGLTMAPLEPEGS

SEQ ID NO: 4763 - protein, 95 aa, Thermosynechococcus elongatus
ASVVPQERQQDTRKHYPNYKVIVLNDDFNTFRHVAACLMKYIPNMTSDRAWELSNQVHYEGQAIVWVGPQEQAELYHEQLLRAGLTMAPLEPEGS

SEQ ID NO: 4764 - protein, 95 aa, Thermosynechococcus elongatus
ASVVPQERQQDTRKHYPNYKVIVLNDDFNTFRHVAACLMKYIPNMTSDRAWELINQVHYEGQAIVWVGPQEQAELYHEQLLRAGLTMAPLEPGGS

SEQ ID NO: 4765 - protein, 95 aa, Thermosynechococcus elongatus
ASVVPQERQQDTRKHYPNYKVIVLNDDFNTFRHVAACLMKYIPNMTSDRAWELANQVHYGGRAIVWVGPQEQAELYHEQLLRAGLTMAPLEPGGS

SEQ ID NO: 4766 - protein, 95 aa, Thermosynechococcus elongatus
ASVVPQERQQDTRKHYPNYKVIVLNDDFNTFRHVAACLMKYIPNMTSDRAWEFTNQVHYKGQAIVWVGPQEQAELNHEQLLRAGLTMAPLEPEGS

SEQ ID NO: 4767 - protein, 95 aa, Thermosynechococcus elongatus
ASVVPQERQQDTRKHYPNYKVIVLNDDFNTFRHVAACLMKYIPNMTSDRAWEFTNQVHYEGQAIVWVGPQEQAELYQEPLLRAGLTMAPLEPEGS

SEQ ID NO: 4768 - protein, 95 aa, Thermosynechococcus elongatus
ASVVPQERQQDTRKHYPNYKVIVLNDDFNTFRHVAACLMKYIPNMTSDRAWEFTNQVHYEGQAIVWVGPQVQAELYHEQLLRAGLTMAPLEPGGS

SEQ ID NO: 4769 - protein, 95 aa, Thermosynechococcus elongatus
ASVVPQERQQDTRKHYPNYKVIVLNDDFNTFRHVAACLMKYIPNMTSDRAWEFTNQVHYEGQAIVWVGLQEQAELYHEQLLRAGLTMAPLEPEGS

SEQ ID NO: 4770 - protein, 95 aa, Thermosynechococcus elongatus
ASVVPQERQQDTRKHYPNYKVIVLNDDFNTFRHVAACLMKYIPNMTSDRAWEFTNQVHYEGRAIVWVGPQEQAELYHEQLLRAGLTMAPLEPEGS

SEQ ID NO: 4771 - protein, 95 aa, Thermosynechococcus elongatus
ASVVPQERQQDTRKHYPNYKVIVLNDDFNTFRHVAACLMKYIPNMTSDRAWDLTNQVHDEGQALAWVGPQEQAELYHEPLLRAGLTMAPLEPEGS

SEQ ID NO: 4772 - protein, 95 aa, Thermosynechococcus elongatus
ASVVPQERQQDTRKHYPNYKVIVLNDDFNTFRHVAACLMKYIPNMTSDRAWDLTNQVHYEGQAIVWVGPQEQAELYHEQLLRAGLTMAPLVPEGS

SEQ ID NO: 4773 - protein, 95 aa, Thermosynechococcus elongatus
ASVVPQERQQDTRKHYPNYKVIVLNDDFNTFRHVAACLMKYIPNMTSDRAWDLTNQVHYEGQAIVWVGPQEQAELYHEHLLRAGLTMAPLEPEGS

SEQ ID NO: 4774 - protein, 95 aa, Thermosynechococcus elongatus
ASVVPQERQQDTRKHYPNYKVIVLNDDFNTFRHVAACLMKYIPNMTSDRAWDLTNQVHYAGQAIVWVGPQEQAELYHEQLLRAGLTMAPLEPEGS

SEQ ID NO: 4775 - protein, 95 aa, Thermosynechococcus elongatus
ASVVPQERQQDTRKHYPNYKVIVLNDDFNTFRHVAACLMKYIPNMTSDRAWDLTNPVHYEGQAIVWVGPQEQAELYHEQLLRAGLTMAPLEPEGS

SEQ ID NO: 4776 - protein, 95 aa, Thermosynechococcus elongatus; identical to SEQ ID NO: 2

SEQ ID NO: 4777 - protein, 95 aa, Thermosynechococcus elongatus; identical to SEQ ID NO: 7

SEQ ID NO: 4778 - protein, 95 aa, Thermosynechococcus elongatus; identical to SEQ ID NO: 483

SEQ ID NO: 4779 - protein, 95 aa, Thermosynechococcus elongatus
ASVVPQERQQDTRKHYPNYKVIVLNDDFNTFRHVAACLMKYIPNMTSDRAWGLTNQVHYEGQAIVWVGPQEQAELYHEQLLRAGLTMAPLEPEGS

SEQ ID NO: 4780 - protein, 95 aa, Thermosynechococcus elongatus
ASVVPQERQQDTRKHYPNYKVIVLNDDFNTFRHVAACLMKYIPNMTSDRAWVLTNQVHYEGQAIVWVGPQEQAELYHEQLLRAGLTMAPLEPEGS

SEQ ID NO: 4781 - protein, 51 aa, Thermosynechococcus elongatus; identical to SEQ ID NO: 409

SEQ ID NO: 4782 - protein, 51 aa, Thermosynechococcus elongatus; identical to SEQ ID NO: 409

SEQ ID NO: 4783 - protein, 51 aa, Thermosynechococcus elongatus; identical to SEQ ID NO: 409

SEQ ID NO: 4784 - protein, 95 aa, Thermosynechococcus elongatus
ASVVPQERQQDTRKHYPNYKVIVLNDDFNTFRHVAACLMKYIPNMTSDRACELTNQVHYEGQAIVWVGPQEQAELYHEQLLRDGLTMAPLEPEGS

SEQ ID NO: 4785 - protein, 92 aa, Thermosynechococcus elongatus
ASVVPQERQQDTRKHYPNYKVIVLNDDFNTFRHVAACLMKYIPNMTSDRACELTNQVHYEGQAIVWVGPQEQAELYHEQLLRAGLTMAPLEP

SEQ ID NO: 4786 - protein, 95 aa, Thermosynechococcus elongatus
ASVVPQERQQDTRKHYPNYKVIVLNDDFNTFRHVAACLMKYIPNMTSDRACELTNQVHYEGQAIVWVGPQVQAELYHEQLLRAGLTMAPLEPGGS

SEQ ID NO: 4787 - protein, 95 aa, Thermosynechococcus elongatus
ASVVPQERQQDTRKHYPNYKVIVLNDDFNTFRHVAACLMKYIPNMTSDRACELTNQVHFEGQAIVWVGPQVQAELYHEQLLRAGLTLAPLEPGGS

SEQ ID NO: 4788 - protein, 95 aa, Thermosynechococcus elongatus
ASVVPQERQQDTRKHYPNYKVIVLNDDFNTFRHVAACLMKYIPNMTSDRALESTNQVHYEGQAIVWVGPQEQAELYHEQLLRAGLTMAPLEPEGS

SEQ ID NO: 4789 - protein, 95 aa, Thermosynechococcus elongatus
ASVVPQERQQDTRKHYPNYKVIVLNDDFNTFRHVAACLMKYIPNMTSDRALELTNQVHYEGQAIVWVGPQEQAELYHEQVLRAGLTMAPLEPEGS

SEQ ID NO: 4790 - protein, 95 aa, Thermosynechococcus elongatus; identical to SEQ ID NO: 738

SEQ ID NO: 4791 - protein, 95 aa, Thermosynechococcus elongatus
ASVVPQERQQDTRKHYPNYKVIVLNDDFNTFRHVAACLMKYIPNMTSDRSWELTNQVHYEGQAIVWVGPQVQAELYHEQLLRAGLTMAPLEPEGS

SEQ ID NO: 4792 - protein, 95 aa, Thermosynechococcus elongatus
ASVVPQERQQDTRKHYPNYKVIVLNDDFNTFRHVAACLMKYIPNMTSDSAWELTNQVHYEGQAIVWVGPQEQAELYHEQLLRAGLTMAPLEPEGS

SEQ ID NO: 4793 - protein, 95 aa, Thermosynechococcus elongatus
ASVVPQERQQDTRKHYPNYKVIVLNDDFNTFRHVAACLMKYIPNMTSDSAWELTNQVHYEGQAIVWVGPQVQAELYHEQLLRAGLTMAPLEPGGS

SEQ ID NO: 4794 - protein, 95 aa, Thermosynechococcus elongatus; identical to SEQ ID NO: 2

SEQ ID NO: 4795 - protein, 95 aa, Thermosynechococcus elongatus
ASVVPQERQQDTRKHYPNYKVIVLNDDFNTFRHVAACLMKYIPNMTSDSAWELTNQVHYKGQAIVWVGPQEQAELNHEQLLRAGLTMAPLEPEGS

SEQ ID NO: 4796 - protein, 95 aa, Thermosynechococcus elongatus
ASVVPQERQQDTRKHYPNYKVIVLNDDFNTFRHVAACLMKYIPNMTSDIAWELTNQVHYEGQAIVWIGPQVQAELYHEQLLRAGLTMAPLEPGGS

SEQ ID NO: 4797 - protein, 95 aa, Thermosynechococcus elongatus
ASVVPQERQQDTRKHYPNYKVIVLNDDFNTFRHVAACLMKYIPNMTSDIAWELTNQVHYEGQAIVWVGPQVQAELYHEQLLRAGLTMAPLEPEGS

SEQ ID NO: 4798 - protein, 95 aa, Thermosynechococcus elongatus; identical to SEQ ID NO: 2

SEQ ID NO: 4799 - protein, 95 aa, Thermosynechococcus elongatus
ASVVPQERQQDTRKHYPNYKVIVLNDDFNTFRHVAACLMKYIPNMTSYRAWELTNQGHYEGQAIVWVGPQEQAELYHEQLLRAGLTMAPLEPEGS

SEQ ID NO: 4800 - protein, 95 aa, Thermosynechococcus elongatus
ASVVPQERQQDTRKHYPNYKVIVLNDDFNTFRHVAACLMKYIPNMTSYRSWELTNQVHYEGQAIVWVGPQEQAELYHEQLLRAGLTMAPLEPEGS

SEQ ID NO: 4801 - protein, 95 aa, Thermosynechococcus elongatus
ASVVPQERQQDTRKHYPNYKVIVLNDDFNTFRHVAACLMKYIPNMTFDRAWELTNQVHYEGQAIVWVGPQEQAELYHEQLLRAGLTMAPLEPEGS

SEQ ID NO: 4802 - protein, 95 aa, Thermosynechococcus elongatus
ASVVPQERQQDTRKHYPNYKVIVLNDDFNTFRHVAACLMKYIPNMTFDRAWELTNQVHYEGQAIVWVGPQVQAELYHEQLLRAGLTMAPLEPGGS

SEQ ID NO: 4803 - protein, 95 aa, Thermosynechococcus elongatus
ASVVPQERQQDTRKHYPNYKVIVLNDDFNTFRHVAACLMKYIPNMSSDRAWELTNQVHYGGRAIVWVGPQEQAELYHEQLLRAGLTMAPLEPEGS

SEQ ID NO: 4804 - protein, 95 aa, Thermosynechococcus elongatus
ASVVPQERQQDTRKHYPNYKVIVLNDDFNTFRHVAACLMKYIPNMISDRAWESTNQVHYGGRAIVWVGPQVQAELYHEQLLRAGLTMAPLEPGGS

SEQ ID NO: 4805 - protein, 95 aa, Thermosynechococcus elongatus; identical to SEQ ID NO: 42

SEQ ID NO: 4806 - protein, 95 aa, Thermosynechococcus elongatus
ASVVPQERQQDTRKHYPNYKVIVLNDDFNTFRHVAACLMKYIPNMISDRAWELTNQVHYGGQAIVWVGPQEQAELYHEQLLRAGLTMDPLEPEGS

SEQ ID NO: 4807 - protein, 95 aa, Thermosynechococcus elongatus
ASVVPQERQQDTRKHYPNYKVIVLNDDFNTFRHVAACLMKYIPNMISDRAWELTNQVHYGGQAIVWVGPQVQAELYHEQLLRAGLTMAPLEPGGS

SEQ ID NO: 4808 - protein, 95 aa, Thermosynechococcus elongatus
ASVVPQERQQDTRKHYPNYKVIVLNDDFNTFRHVAACLMKYIPNMISDRAWELTNQVHYGGRAIVWVGPQEQAELNHEQLLRAGLTMAPLEPEGS

SEQ ID NO: 4809 - protein, 95 aa, Thermosynechococcus elongatus
ASVVPQERQQDTRKHYPNYKVIVLNDDFNTFRHVAACLMKYIPNMISDRAWELTNQVHYGGRAIVWVGPQEQTELYHEQLLRAGLTMAPLEPEGS

SEQ ID NO: 4810 - protein, 95 aa, Thermosynechococcus elongatus
ASVVPQERQQDTRKHYPNYKVIVLNDDFNTFRHVAACLMKYIPNMISDRAWELTNQVHYGGRAIVWVGPQEQAELYHEQLLRTGLTMAPLEPEGS

SEQ ID NO: 4811 - protein, 95 aa, Thermosynechococcus elongatus
ASVVPQERQQDTRKHYPNYKVIVLNDDFNTFRHVAACLMKYIPNMISDRAWELTNQVHYGGRAIVWVGPQEQAELYHEQLLRAGLTMAQLEPEGS

SEQ ID NO: 4812 - protein, 95 aa, Thermosynechococcus elongatus
ASVVPQERQQDTRKHYPNYKVIVLNDDFNTFRHVAACLMKYIPNMISDRAWELTNQVHYGGRAIVWVGPQEQAELYHEQLLRAGLTMAPLEPKGS

SEQ ID NO: 4813 - protein, 95 aa, Thermosynechococcus elongatus; identical to SEQ ID NO: 42

SEQ ID NO: 4814 - protein, 90 aa, Thermosynechococcus elongatus
ASVVPQERQQDTRKHYPNYKVIVLNDDFNTFRHVAACLMKYIPNMISDRAWELTNQVHYGGRAIVWVGPQEQAELYHEQLLRAGLTMAPL

SEQ ID NO: 4815 - protein, 95 aa, Thermosynechococcus elongatus
ASVVPQERQQDTRKHYPNYKVIVLNDDFNTFRHVAACLMKYIPNMISDRAWELTNQVHYGGRAIVWVGPQEQAELYHEQLLRACLTMAPLEPEGS

SEQ ID NO: 4816 - protein, 95 aa, Thermosynechococcus elongatus
ASVVPQERQQDTRKHYPNYKVIVLNDDFNTFRHVAACLMKYIPNMISDRAWELTNQVHYGGRAIVWVGPQEQAELYHEQLLRVGLTMAPLEPEGS

SEQ ID NO: 4817 - protein, 95 aa, Thermosynechococcus elongatus
ASVVPQERQQDTRKHYPNYKVIVLNDDFNTFRHVAACLMKYIPNMISDRAWELTNQVHYGGRAIVWVGPQEQAELYHELLLRAGLTMAPLEPEGS

SEQ ID NO: 4818 - protein, 95 aa, Thermosynechococcus elongatus
ASVVPQERQQDTRKHYPNYKVIVLNDDFNTFRHVAACLMKYIPNMISDRAWELTNQVHYGGRAIVWVGPQEQAELYREQLLRAGLTMAPLEPEGS

SEQ ID NO: 4819 - protein, 95 aa, Thermosynechococcus elongatus
ASVVPQERQQDTRKHYPNYKVIVLNDDFNTFRHVAACLMKYIPNMISDRAWELTNQVHYGGRAIVWVGPQVQAELYHEQLLRAGLTMAPLEPGGS

SEQ ID NO: 4820 - protein, 95 aa, Thermosynechococcus elongatus
ASVVPQERQQDTRKHYPNYKVIVLNDDFNTFRHVAACLMKYIPNMISDRAWELTNQVHYGGRAIVWVGPREQAELYHEQLLRAGLTMAPLEPEGS

SEQ ID NO: 4821 - protein, 95 aa, Thermosynechococcus elongatus
ASVVPQERQQDTRKHYPNYKVIVLNDDFNTFRHVAACLMKYIPNMISDRAWELTNQVHYVGRAIVWVGPQEQAELYHEQLLRAGLTMAPLEPEGS

SEQ ID NO: 4822 - protein, 95 aa, Thermosynechococcus elongatus
ASVVPQERQQDTRKHYPNYKVIVLNDDFNTFRHVAACLMKYIPNMISDRALELTNQVHYEGQAIVWVGPQVQAELYHEQLLRAGLTMAPLEPGGS

SEQ ID NO: 4823 - protein, 95 aa, Thermosynechococcus elongatus
ASVVPQERQQDTRKHYPNYKVIVLNDDFNTFRHVAACLMKYIPNMASDRAWELTNQVHYEGQAIVWVGPQEQAELYHEQLLRAGLTMAPLEPEGS

SEQ ID NO: 4824 - protein, 95 aa, Thermosynechococcus elongatus
ASVVPQERQQDTRKHYPNYKVIVLNDDFNTFRHVAACLMKYIPNMSSDRAWELTNQVHYEGQAIVWVGPQEQAELYHEQLLRAGLTMAPLEPEGS

SEQ ID NO: 4825 - protein, 95 aa, Thermosynechococcus elongatus
ASVVPQERQQDTRKHYPNYKVIVLNDDFNTFRHVAACLMKYIPNITSDRAWELTNQVHYEGQAIVWVGPQVQAELYHEQLLRAGLTMAPLEPEGS

SEQ ID NO: 4826 - protein, 95 aa, Thermosynechococcus elongatus
ASVVPQERQQDTRKHYPNYKVIVLNDDFNTFRHVAACLMKYIPNQTSDRAWELTNQVHYVGQAIVWVGPQERAELYHEQLLRAGLTMAPLEPEGS

SEQ ID NO: 4827 - protein, 95 aa, Thermosynechococcus elongatus
ASVVPQERQQDTRKHYPNYKVIVLNDDFNTFRHVAACLMKYIPNLTSDRAWELTNQLHYEGQAIVWVRPQEQAELYHQQLLTAGLTIAPLEPEGS

SEQ ID NO: 4828 - protein, 95 aa, Thermosynechococcus elongatus
ASVVPQERQQDTRKHYPNYKVIVLNDDFNTFRHVAACLMKYIPNLTSDRAWELTNQVHYEGQAIVWVGPQEQAELYHEQLLRAGLTMAPLEPEGS

SEQ ID NO: 4829 - protein, 95 aa, Thermosynechococcus elongatus
ASVVPQERQQDTRKHYPNYKVIVLNDDFNTFRHVAACLMKYIPNETSDRAWELTNQVHYEGQAIVWVGPQEQAELYHEQLLRAGLTMAPLEPEGS

SEQ ID NO: 4830 - protein, 95 aa, Thermosynechococcus elongatus; identical to SEQ ID NO: 742

SEQ ID NO: 4831 - protein, 44 aa, Thermosynechococcus elongatus; identical to SEQ ID NO: 3814

SEQ ID NO: 4832 - protein, 95 aa, Thermosynechococcus elongatus; identical to SEQ ID NO: 4828

SEQ ID NO: 4833 - protein, 95 aa, Thermosynechococcus elongatus; identical to SEQ ID NO: 946

SEQ ID NO: 4834 - protein, 95 aa, Thermosynechococcus elongatus
ASVVPQERQQDTRKHYPNYKVIVLNDDFNTFRHVAACLMKYIPNMNSDRAWELTNQVHYKGQAIVWVGPQEQAELNHEQLLRAGLTMAPLEPEGS

SEQ ID NO: 4835 - protein, 95 aa, Thermosynechococcus elongatus; identical to SEQ ID NO: 18

SEQ ID NO: 4836 - protein, 95 aa, Thermosynechococcus elongatus; identical to SEQ ID NO: 18

SEQ ID NO: 4837 - protein, 95 aa, Thermosynechococcus elongatus
ASVVPQERQQDTRKHYPNYKVIVLNDDFNTFRHVAACLMKYIPNMTSDRAWELTNQDHYKGQAIVWVGPQEQAELNHEQLLRAGLTMAPLEPEGS

SEQ ID NO: 4838 - protein, 95 aa, Thermosynechococcus elongatus; identical to SEQ ID NO: 4383

SEQ ID NO: 4839 - protein, 58 aa, Thermosynechococcus elongatus; identical to SEQ ID NO: 569

SEQ ID NO: 4840 - protein, 95 aa, Thermosynechococcus elongatus
ASVVPQERQQDTRKHYPNYKVIVLNDDFNTFRHVAACLMKYIPNMTSDRAWELTNQVHYKGQDIVWVGPQEQAELNHEQLLRAGLTMAPLEPEGS

SEQ ID NO: 4841 - protein, 95 aa, Thermosynechococcus elongatus
ASVVPQERQQDTRKHYPNYKVIVLNDDFNTFRHVAACLMKYIPNMTSDRAWELTNQVHYKGQAIVWVGPPEQAELNHEQLLRAGLTMAPLEPEGS

SEQ ID NO: 4842 - protein, 95 aa, Thermosynechococcus elongatus; identical to SEQ ID NO: 18

SEQ ID NO: 4843 - protein, 95 aa, Thermosynechococcus elongatus
ASVVPQERQQDTRKHYPNYKVIVLNDDFNTFRHVAACLMKYIPNMTSDRAWELTNQVHYKGQAIVWDGPQEQAELNHEQLLRAGLTMAPLEPEGS

SEQ ID NO: 4844 - protein, 95 aa, Thermosynechococcus elongatus
ASVVPQERQQDTRKHYPNYKVIVLNDDFNTFRHVAACLMKYIPNMTSDRAWELTNQVHYKGQAIVWVGPQEQAELNHEKLLRAGLTMAPLEPEGS

SEQ ID NO: 4845 - protein, 95 aa, Thermosynechococcus elongatus
ASVVPQERQQDTRKHYPNYKVIVLNDDFNTFRHVAACLMKYIPNMTSDRAWELTNQVHYKGQAIVWVGPQEQAELNHEQSLRAGLTMAPLEPEGS

SEQ ID NO: 4846 - protein, 95 aa, Thermosynechococcus elongatus
ASVVPQERQQDTRKHYPNYKVIVLNDDFNTFRHVAACLMKYIPNMTSDRAWELTNQVHYKGQAIVWVGPQEQAELNHEQLLRAGLTRAPLEPEGS

SEQ ID NO: 4847 - protein, 95 aa, Thermosynechococcus elongatus; identical to SEQ ID NO: 18

SEQ ID NO: 4848 - protein, 95 aa, Thermosynechococcus elongatus
ASVVPQERQQDTRKHYPNYKVIVLNDDFNTFRHVAACLMKYIPNMTSDRAWELTNQVHYKGQAIVWVGPQEQAELNHEQLLRAGLTMATLEPEGS

SEQ ID NO: 4849 - protein, 95 aa, Thermosynechococcus elongatus
ASVVPQERQQDTRKHYPNYKVIVLNDDFNTFRHVAACLMKYIPNMTSDRAWELTNQVHYKGQAIVWVGPQEQAELNHEQLLRAGLTMAPLEPKGS

SEQ ID NO: 4850 - protein, 95 aa, Thermosynechococcus elongatus
ASVVPQERQQDTRKHYPNYKVIVLNDDFNTFRHVAACLMKYIPNMTSDRAWELTNQVHYKGQAIVWVGPQEQAELNHEQLLRAGLTMAPLEPDGS

SEQ ID NO: 4851 - protein, 92 aa, Thermosynechococcus elongatus
ASVVPQERQQDTRKHYPNYKVIVLNDDFNTFRHVAACLMKYIPNMTSDRAWELTNQVHYKGQAIVWVGPQEQAELNHEQLLRAGLTMAPLEP

SEQ ID NO: 4852 - protein, 95 aa, Thermosynechococcus elongatus; identical to SEQ ID NO: 18

SEQ ID NO: 4853 - protein, 95 aa, Thermosynechococcus elongatus
ASVVPQERQQDTRKHYPNYKVIVLNDDFNTFRHVAACLMKYIPNMTSDRAWELTNQVHYKGQAIVWVGPQEQAELNHEQLLRAGLAMAPLEPEGS

SEQ ID NO: 4854 - protein, 95 aa, Thermosynechococcus elongatus
ASVVPQERQQDTRKHYPNYKVIVLNDDFNTFRHVAACLMKYIPNMTSDRAWELTNQVHYKGQAIVWVGPQEQAELNHEQLLRAVLTMAPLEPEGS

SEQ ID NO: 4855 - protein, 95 aa, Thermosynechococcus elongatus
ASVVPQERQQDTRKHYPNYKVIVLNDDFNTFRHVAACLMKYIPNMTSDRAWELTNQVHYKGQAIVWVGPQEQAELNHEHLLRAGLTMAPLEPEGS

SEQ ID NO: 4856 - protein, 95 aa, Thermosynechococcus elongatus
ASVVPQERQQDTRKHYPNYKVIVLNDDFNTFRHVAACLMKYIPNMTSDRAWELTNQVHYKGQAIVWVGPQEQAELNHELLLRAGLTMAPLEPEGS

SEQ ID NO: 4857 - protein, 95 aa, Thermosynechococcus elongatus
ASVVPQERQQDTRKHYPNYKVIVLNDDFNTFRHVAACLMKYIPNMTSDRAWELTNQVHYKGQAIVWVGPQEQAELNHDQLLRAGLTMAPLEPEGS

SEQ ID NO: 4858 - protein, 95 aa, Thermosynechococcus elongatus
ASVVPQERQQDTRKHYPNYKVIVLNDDFNTFRHVAACLMKYIPNMTSDRAWELTNQVHYKGQAIVWVGPQEQAELNHGQLLRAGLTMAPLEPEGS

SEQ ID NO: 4859 - protein, 77 aa, Thermosynechococcus elongatus
ASVVPQERQQDTRKHYPNYKVIVLNDDFNTFRHVAACLMKYIPNMTSDRAWELTNQVHYKGQAIVWVGPQEQAELNH

SEQ ID NO: 4860 - protein, 95 aa, Thermosynechococcus elongatus
ASVVPQERQQDTRKHYPNYKVIVLNDDFNTFRHVAACLMKYIPNMTSDRAWELTNQVHYKGQAIVWVGPQEQAELIHEQLLRAGLTIATLVPEGS

SEQ ID NO: 4861 - protein, 95 aa, Thermosynechococcus elongatus
ASVVPQERQQDTRKHYPNYKVIVLNDDFNTFRHVAACLMKYIPNMTSDRAWELTNQVHYKGQAIVWVGPQEQAELYHKQLLRAGLTMAPLEPEGS

SEQ ID NO: 4862 - protein, 95 aa, Thermosynechococcus elongatus; identical to SEQ ID NO: 1603

SEQ ID NO: 4863 - protein, 95 aa, Thermosynechococcus elongatus
ASVVPQERQQDTRKHYPNYKVIVLNDDFNTFRHVAACLMKYIPNMTSDRAWELTNQVHYKGQAIVWVGPQERAELNHEQLLRAGLTMAPLEPEGS

SEQ ID NO: 4864 - protein, 95 aa, Thermosynechococcus elongatus
ASVVPQERQQDTRKHYPNYKVIVLNDDFNTFRHVAACLMKYIPNMTSDRAWELTNQVHYKGQAIVWVGPLEQAELNHEQLLRAGLTMAPLEPEGS

SEQ ID NO: 4865 - protein, 95 aa, Thermosynechococcus elongatus
ASVVPQERQQDTRKHYPNYKVIVLNDDFNTFRHVAACLMKYIPNMTSDRAWELTNQVHYKGQAIVWVVPQEQAELNHEQLLRAGLTMAPLEPEGS

SEQ ID NO: 4866 - protein, 95 aa, Thermosynechococcus elongatus
ASVVPQERQQDTRKHYPNYKVIVLNDDFNTFRHVAACLMKYIPNMTSDRAWELTNQVHYKGQAIVWVGPQEQAELNLELLLRAGLTMAPLEPEGS

SEQ ID NO: 4867 - protein, 95 aa, Thermosynechococcus elongatus
ASVVPQERQQDTRKHYPNYKVIVLNDDFNTFRHVAACLMKYIPNMTSDRAWELTNQVHYKGQAIVWVGPQVQAELYHEQLLRAGLTMAPLEPEGS

SEQ ID NO: 4868 - protein, 95 aa, Thermosynechococcus elongatus
ASVVPQERQQDTRKHYPNYKVIVLNDDFNTFRHVAACLMKYIPNMTSDRAWELTNQVHYKGLAIVWVGPQEQAELYHEQLLRAGLTMAPLEPEGS

SEQ ID NO: 4869 - protein, 95 aa, Thermosynechococcus elongatus
ASVVPQERQQDTRKHYPNYKVIVLNDDFNTFRHVAACLMKYIPNMTSDRAWELTNQVHYKVQAIVWVGPQEQAELNHEQLLRAGLTMAPLEPEGS

SEQ ID NO: 4870 - protein, 95 aa, Thermosynechococcus elongatus
ASVVPQERQQDTRKHYPNYKVIVLNDDFNTFRHVAACLMKYIPNMTSDRAWELTNQVHYNGQAIVWVGPQEQAELYHEQLLRAGLTMAPLEPEGS

SEQ ID NO: 4871 - protein, 95 aa, Thermosynechococcus elongatus; identical to SEQ ID NO: 18

SEQ ID NO: 4872 - protein, 95 aa, Thermosynechococcus elongatus; identical to SEQ ID NO: 4405

SEQ ID NO: 4873 - protein, 95 aa, Thermosynechococcus elongatus; identical to SEQ ID NO: 292

SEQ ID NO: 4874 - protein, 95 aa, Thermosynechococcus elongatus; identical to SEQ ID NO: 2

SEQ ID NO: 4875 - protein, 95 aa, Thermosynechococcus elongatus; identical to SEQ ID NO: 16

SEQ ID NO: 4876 - protein, 95 aa, Thermosynechococcus elongatus; identical to SEQ ID NO: 214

SEQ ID NO: 4877 - protein, 95 aa, Thermosynechococcus elongatus; identical to SEQ ID NO: 2

SEQ ID NO: 4878 - protein, 95 aa, Thermosynechococcus elongatus
ASVVPQERQQDTRKHYPNYKVIVLNDDFNTFRHVAACLMKYIPNMTSDRAWELTNQVHYEGQAIVWVGPQVQAELYHERLLRAGLTMAPLEPEGS

SEQ ID NO: 4879 - protein, 95 aa, Thermosynechococcus elongatus
ASVVPQERQQDTRKHYPNYKVIVLNDDFNTFRHVAACLMKYIPNMTSDRAWELTNQVHYEGQAIVWVGPQVQAELYHVQLLRAGLTMAPLEPGGS

SEQ ID NO: 4880 - protein, 95 aa, Thermosynechococcus elongatus; identical to SEQ ID NO: 28

SEQ ID NO: 4881 - protein, 95 aa, Thermosynechococcus elongatus; identical to SEQ ID NO: 408

SEQ ID NO: 4882 - protein, 95 aa, Thermosynechococcus elongatus
ASVVPQERQQDTRKHYPNYKVIVLNDDFNTFRHVAACLMKYIPNMTSDRAWELTNQVHFKGKAFVWVGPQEQAELFLEQLLSAGLTMAPLVTEGS

SEQ ID NO: 4883 - protein, 95 aa, Thermosynechococcus elongatus
ASVVPQERQQDTRKHYPNYKVIVLNDDFNTFRHVAACLMKYIPNMTSDRAWELTNQFHYKGQAIVWVGPQEQAEFNHEQLLRAGLTMAPLEPEGS

SEQ ID NO: 4884 - protein, 95 aa, Thermosynechococcus elongatus
ASVVPQERQQDTRKHYPNYKVIVLNDDFNTFRHVAACLMKYIPNMTSDRAWELTNQFHYKCIYIVWVGPQVQAEFIHEQLLRAGLSMAPLEPEGS

SEQ ID NO: 4885 - protein, 95 aa, Thermosynechococcus elongatus
ASVVPQERQQDTRKHYPNYKVIVLNDDFNTFRHVAACLMKYIPNMTSDRAWELTNHGHYHRQAIVWVGPQEQAELNHEQLLRAGLTMAPLEPEGS

SEQ ID NO: 4886 - protein, 95 aa, Thermosynechococcus elongatus; identical to SEQ ID NO: 4766

SEQ ID NO: 4887 - protein, 95 aa, Thermosynechococcus elongatus; identical to SEQ ID NO: 1594

SEQ ID NO: 4888 - protein, 95 aa, Thermosynechococcus elongatus
ASVVPQERQQDTRKHYPNYKVIVLNDDFNTFRHVAACLMKYIPNMTSDRALELTNQVHYKGQAIVWVVPQEQAELNHEQLLRAGLTMAPLEPEGS

SEQ ID NO: 4889 - protein, 95 aa, Thermosynechococcus elongatus
ASVVPQERQQDTRKHYPNYKVIVLNDDFNTFRHVAACLMKYIPNMTSDIAWELTNQVHYKGQAIVWVGPQEQAELNHEQLLRAGLTMAPLEPEGS

SEQ ID NO: 4890 - protein, 95 aa, Thermosynechococcus elongatus
ASVVPQERQQDTRKHYPNYKVIVLNDDFNTFRHVAACLMKYIPNMTSDRAWELTNQVLYKGQAIVWVGPQEQAELNHEQLLRAGLTMAPLEPEGS

SEQ ID NO: 4891 - protein, 95 aa, Thermosynechococcus elongatus
ASVVPQERQQDTRKHYPNYKVIVLNDDFNTFRHVAACLMKYIPNITSDRAWELTNQFHYKGQAIVWVVPQEQSELNHEQLLRAGLTMAQLEPEGS

SEQ ID NO: 4892 - protein, 95 aa, Thermosynechococcus elongatus
ASVVPQERQQDTRKHYPNYKVIVLNDDFNTFRHVAACLMKYIPTKTSDRAWELTNQVHYEGQAIVWVGPQEQAELYHEQLLRAGLTMAPLEPEGS

SEQ ID NO: 4893 - protein, 95 aa, Thermosynechococcus elongatus
ASVVPQERQQDTRKHYPNYKVIVLNDDFNTFRHVAACLMKYIPTKTSDRAWELTNQVHYEGQAIVWVGPQEQAVLYHEQLLRAGLTMAQLEPEGS

SEQ ID NO: 4894 - protein, 95 aa, Thermosynechococcus elongatus
ASVVPQERQQDTRKHYPNYKVIVLNDDFNTFRHVAACLMKYIPTMTSDRAWELTNQVHYEGQAIVWVGPQEQAELYHEQLLRAGLTMAPLEPEGS

SEQ ID NO: 4895 - protein, 95 aa, Thermosynechococcus elongatus
ASVVPQERQQDTRKHYPNYKVIVLNDDFNTFRHVAACLMKYIPSMTSDRAWELTNQVHYEGQAIVWVGPQVQAELYHEQLLRAGLTMAPLEPGGS

SEQ ID NO: 4896 - protein, 95 aa, Thermosynechococcus elongatus
ASVVPQERQQDTRKHYPNYKVIVLNDDFNTFRHVAACLMKYIPIMTSDRAWELTNQVHYEGQAIVWVGPQEQAELYHEQLLRTGLTMAPLEPEGS

SEQ ID NO: 4897 - protein, 95 aa, Thermosynechococcus elongatus
ASVVPQERQQDTRKHYPNYKVIVLNDDFNTFRHVAACLMKYIPIMTSDRAWELTNQVHYEGQAIVWVGPQEQAELYHEQLLRAGLTMSPLEPEGS

SEQ ID NO: 4898 - protein, 95 aa, Thermosynechococcus elongatus
ASVVPQERQQDTRKHYPNYKVIVLNDDFNTFRHVAACLMKYIPIMTSDRAWELTNQVHYEGQAIVWVGPQEQAELSPEHLWRARLTLAPLEPEGS

SEQ ID NO: 4899 - protein, 95 aa, Thermosynechococcus elongatus
ASVVPQERQQDTRKHYPNYKVIVLNDDFNTFRHVAACLMKYIPHKTSDRAWELTNQVHYEGQAIVWVGPQEQAELYHEQLLRAGLTLAPLEPEGS

SEQ ID NO: 4900 - protein, 95 aa, Thermosynechococcus elongatus
ASVVPQERQQDTRKHYPNYKVIVLNDDFNTFRHVAACLMKYIPHKTSDRAWDWTNQVHYEGQAIVWGGPQAQAELYHEQLLRAGLTMAPLEPEGS

SEQ ID NO: 4901 - protein, 95 aa, Thermosynechococcus elongatus
ASVVPQERQQDTRKHYPNYKVIVLNDDFNTFRHVAACLMKYIPHMTSDRAWELTNQVHYEGQAIGWVGPQEQAELYHEQLLRAGLTMAPLEPEGS

SEQ ID NO: 4902 - protein, 95 aa, Thermosynechococcus elongatus
ASVVPQERQQDTRKHYPNYKVIVLNDDFNTFRHVAACLMKYIPHMTSDRAWELTNQVHYEGQAIVWVGPQVQAELNHEQLLRAGLTMAPLEPEGS

SEQ ID NO: 4903 - protein, 95 aa, Thermosynechococcus elongatus
ASVVPQERQQDTRKHYPNYKVIVLNDDFNTFRHVAACLMKYIPHMTSDRAWELTNQVHYEGQALVWVGPQEQAELYHEQLLRAGLTMAPLEPEGS

SEQ ID NO: 4904 - protein, 95 aa, Thermosynechococcus elongatus
ASVVPQERQQDTRKHYPNYKVIVLNDDFNTFRHVAACLMKYIPLMTSDRAWELTNQVHYEGQAIVWVGPQEQAELYHEQLLRAGLTRAPLEPEGS

SEQ ID NO: 4905 - protein, 95 aa, Thermosynechococcus elongatus; identical to SEQ ID NO: 1612

SEQ ID NO: 4906 - protein, 95 aa, Thermosynechococcus elongatus
ASVVPQERQQDTRKHYPNYKVIVLNDDFNTFRHVAACLMKYIPNKTSDRAWELTNQLHYECLAIVWVGPQEQAELYHEQLLRAGLTMAPLEPEGS

SEQ ID NO: 4907 - protein, 95 aa, Thermosynechococcus elongatus; identical to SEQ ID NO: 4

SEQ ID NO: 4908 - protein, 95 aa, Thermosynechococcus elongatus
ASVVPQERQQDTRKHYPNYKVIVLNDDFNTFRHVAACLMKYIRNKTSDRAWELTNQVHYEGQAIVWVGPQEQAELYHEQLLRAGLTMAPLEPEGS

SEQ ID NO: 4909 - protein, 95 aa, Thermosynechococcus elongatus
ASVVPQERQQDTRKHYPNYKVIVLNDDFNTFRHVAACLMKYIRNMTSDRAWELTNQVHYEGQAIVWVGPQEQAELYHEQLLRAGLTMAPLEPEGS

SEQ ID NO: 4910 - protein, 95 aa, Thermosynechococcus elongatus
ASVVPQERQQDTRKHYPNYKVIVLNDDFNTFRHVAACLMKYILNMTSDRAWELTNQVHYEGQAIVWVGPQEQAELYHEQVLRAGLTMAPLEPEGS

SEQ ID NO: 4911 - protein, 95 aa, Thermosynechococcus elongatus
ASVVPQERQQDTRKHYPNYKVIVLNDDFNTFRHVAACLMKYIANMTSDRAWELTNHVHYEGQAIVWVGPQEQAELYHELLLRAGLTMAPLEPEGS

SEQ ID NO: 4912 - protein, 95 aa, Thermosynechococcus elongatus
ASVVPQERQQDTRKHYPNYKVIVLNDDFNTFRHVAACLMKYISNMTSDRAWELTNQVHYEGQAIVWVGPQEQAELNHEQLLRAGLTMAPLEPEGS

SEQ ID NO: 4913 - protein, 95 aa, Thermosynechococcus elongatus
ASVVPQERQQDTRKHYPNYKVIVLNDDFNTFRHVAACLMKYISNMTSDRAWELTNQVHYEGQAIVWVGPQEQAELYHEQLLRAGLTMAPLEPEGS

SEQ ID NO: 4914 - protein, 95 aa, Thermosynechococcus elongatus
ASVVPQERQQDTRKHYPNYKVIVLNDDFNTFRHVAACLMKYISNMTSDRAWELTNQVHYGGRAIVWVGPQEQAELYHEQLLRAGLTMAPLEPEGS

SEQ ID NO: 4915 - protein, 95 aa, Thermosynechococcus elongatus
ASVVPQERQQDTRKHYPNYKVIVLNDDFNTFRHVAACLMKYILNMTSDRAWELTNQVHYEGQAIVWVGPQEQAELYHEQLLRAGLTMAPLEPEGS

SEQ ID NO: 4916 - protein, 95 aa, Thermosynechococcus elongatus
ASVVPQERQQDTRKHYPNYKVIVLNDDFNTFRHVAACLMKYILNKTSDRAWELTNQVHYEGQAIVWVGPQEQAELYHEQLLRAGLTMAPLEPEGS

SEQ ID NO: 4917 - protein, 95 aa, Thermosynechococcus elongatus
ASVVPQERQQDTRKHYPNYKVIVLNDDFNTFRHVAACLMKYVPNMTSDRAWELTNQVHYEGQAIVWVGPQEQAELYHEQLLRAGLTMAPLEPEGS

SEQ ID NO: 4918 - protein, 40 aa, Thermosynechococcus elongatus; identical to SEQ ID NO: 462

SEQ ID NO: 4919 - protein, 95 aa, Thermosynechococcus elongatus
ASVVPQERQQDTRKHYPNYKVIVLNDDFNTFRHVAACLMKCIPNMTSDRAWELTNQVHYEGQAIVWVGPQVQAELYHEQLLRAGLTMAPLEPGGS

SEQ ID NO: 4920 - protein, 95 aa, Thermosynechococcus elongatus
ASVVPQERQQDTRKHYPNYKVIVLNDDFNTFRHVAACLMKFIPNMTSDRAWELTNQVHYEGQAIVWVGPQEQAELYHEQLLRAGLTMAPLEPEGS

SEQ ID NO: 4921 - protein, 95 aa, Thermosynechococcus elongatus
ASVVPQERQQDTRKHYPNYKVIVLNDDFNTFRHVAACLMKFIPNMTSDRAWELTNQVHYEGQAIVWVGPQEQAELYHEQLLRAGLTMAPLEPGGS

SEQ ID NO: 4922 - protein, 95 aa, Thermosynechococcus elongatus
ASVVPQERQQDTRKHYPNYKVIVLNDDFNTFRHVAACLMNYIPNKTSDRAWELTNQVHYEGQAIVWVGPQEQAELYHEQLLRAGLTMAPLEPEGS

SEQ ID NO: 4923 - protein, 95 aa, Thermosynechococcus elongatus
ASVVPQERQQDTRKHYPNYKVIVLNDDFNTFRHVAACLMNYIPNMTSDRAWELTNQVHYEGQAIVWVGPQEQAELYHEQLLRAGLTMAPLEPEGS

SEQ ID NO: 4924 - protein, 95 aa, Thermosynechococcus elongatus
ASVVPQERQQDTRKHYPNYKVIVLNDDFNTFRHVAACLMNYIPNMTSDRAWELTNQVHYEGQAIVWVGPQVQAELYHEQLLRAGLTMAPLEPGGS

SEQ ID NO: 4925 - protein, 95 aa, Thermosynechococcus elongatus
ASVVPQERQQDTRKHYPNYKVIVLNDDFNTFRHVAACLMRYIPNMTSDRAWELTNQVHYEGQAIVWVGPQEQAELYHEQLLRAGLTMAPLEPEGS

SEQ ID NO: 4926 - protein, 95 aa, Thermosynechococcus elongatus
ASVVPQERQQDTRKHYPNYKVIVLNDDFNTFRHVAACLMRYIPNMTSDRAWELTNQVHYEGQAIVWVGPQEQAELYHEQLLRAGLTMAPLEPGGS

SEQ ID NO: 4927 - protein, 95 aa, Thermosynechococcus elongatus
ASVVPQERQQDTRKHYPNYKVIVLNDDFNTFRHVAACLMRYIPNMTSDRAWELTNQVHYEGQAIVWVGPQVQAELNHEQLLRAGLTMAPLEPEGS

SEQ ID NO: 4928 - protein, 95 aa, Thermosynechococcus elongatus
ASVVPQERQQDTRKHYPNYKVIVLNDDFNTFRHVAACLMMYIPNKTSDRAWELTNQVHYEGQAIVWVGPQVQAELYHEQLLRAGLTMAPLEPGGS

SEQ ID NO: 4929 - protein, 95 aa, Thermosynechococcus elongatus
ASVVPQERQQDTRKHYPNYKVIVLNDDFNTFRHVAACLMMYIPNMTSDRAWELTNQVHYEGQAIVWVGPQEQAELYHEQLLRAGLTMAPLEPEGS

SEQ ID NO: 4930 - protein, 95 aa, Thermosynechococcus elongatus
ASVVPQERQQDTRKHYPNYKVIVLNDDFNTFRHVAACLMEYIPNKTSDRAWELTNQVHYEGQAIVWVGPQEQAELYHEQLLRAGLTMAPLEPEGS

SEQ ID NO: 4931 - protein, 95 aa, Thermosynechococcus elongatus
ASVVPQERQQDTRKHYPNYKVIVLNDDFNTFRHVAACLMEYIPNKTSDRAWELTNQVHYEGQAIVWVGPQEQAELYHEQLLRAGLTMASLEPEGS

SEQ ID NO: 4932 - protein, 95 aa, Thermosynechococcus elongatus
ASVVPQERQQDTRKHYPNYKVIVLNDDFNTFRHVAACLMEYIPNMTSDRAWELTNQVHYEGQAIVWVGPQEQAELYHEQLLRAGLTMAPLEPEGS

SEQ ID NO: 4933 - protein, 95 aa, Thermosynechococcus elongatus; identical to SEQ ID NO: 4932

SEQ ID NO: 4934 - protein, 39 aa, Thermosynechococcus elongatus
ASVVPQERQQDTRKHYPNYKVIVLNDDFNTFRHVAACLM

SEQ ID NO: 4935 - protein, 95 aa, Thermosynechococcus elongatus
ASVVPQERQQDTRKHYPNYKVIVLNDDFNTFRHVAACLIKYIPNKTSDRAWELTNQVHYEGQAIVWVCPQEQAELYHEQLLRAGLTMAPLEPEGS

SEQ ID NO: 4936 - protein, 95 aa, Thermosynechococcus elongatus
ASVVPQERQQDTRKHYPNYKVIVLNDDFNTFRHVAACLIKYIPNMTSDRAWELTNQVHYEGQAIVWVGPQEQAELYHEQLLRAGLTMAPLEPGGS

SEQ ID NO: 4937 - protein, 95 aa, Thermosynechococcus elongatus; identical to SEQ ID NO: 4050

SEQ ID NO: 4938 - protein, 95 aa, Thermosynechococcus elongatus
ASVVPQERQQDTRKHYPNYKVIVLNDDFNTFRHVAACLVKYIPNMTSDRAWELTNQVHYEGQAIVWVGPQEQAELYHEQLLRAGLTMAPLEPEGS

SEQ ID NO: 4939 - protein, 95 aa, Thermosynechococcus elongatus
ASVVPQERQQDTRKHYPNYKVIVLNDDFNTFRHVAACLVKYIPNMTSDRAWELTNQVHYEGQAIVWVGPQEQAELYHEQLLRAGLTMAPLEPGGS

SEQ ID NO: 4940 - protein, 96 aa, Thermosynechococcus elongatus
ASVVPQERQQDTRKHYPNYKVIVLNDDFNTFRHVAACLFLWTIPNMISDRAWELTNQVHYGGRAIVWVGPQEQAELYHEQLLRAGLTMAPLEPEGS

SEQ ID NO: 4941 - protein, 95 aa, Thermosynechococcus elongatus
ASVVPQERQQDTRKHYPNYKVIVLNDDFNTFRHVAACFMKYIPNMTSDRAWELTNQVHYEGQAIVWVGPQEQAELYHEQLSRAGLTMAPLEPEGS

SEQ ID NO: 4942 - protein, 95 aa, Thermosynechococcus elongatus
ASVVPQERQQDTRKHYPNYKVIVLNDDFNTFRHVAACFMKYIPNMTSDRAWELTNQVHYEGQAIVWVGPQVQAELYHEQLLRAGLTMAPLEPEGS

SEQ ID NO: 4943 - protein, 95 aa, Thermosynechococcus elongatus
ASVVPQERQQDTRKHYPNYKVIVLNDDFNTFRHVAACFMKYIPNMTSDRAWELTNQVHYGGRAIVWVGPQEQAELYHEQLLRAGLTMAPLEPEGS

SEQ ID NO: 4944 - protein, 95 aa, Thermosynechococcus elongatus
ASVVPQERQQDTRKHYPNYKVIVLNDDFNTFRHVAAWLMKYIPNMTSDRAWELTNQVHYEGQAIVWVGPQEQAELYQEQLLRAGLTMAPLEPEGS

SEQ ID NO: 4945 - protein, 95 aa, Thermosynechococcus elongatus
ASVVPQERQQDTRKHYPNYKVIVLNDDFNTFRHVAAWLMKYIPNMTSDRAWELTNQVHYEGQAIVWVGPQEQAELYHEQLLRAGLTMATFEPEGS

SEQ ID NO: 4946 - protein, 95 aa, Thermosynechococcus elongatus
ASVVPQERQQDTRKHYPNYKVIVLNDDFNTFRHVAAWLMKYIPNMTSDRAWELTNQVHYEGQAIVWVGPQEQAELYHEQLLRAGLTMAPLEPEGS

SEQ ID NO: 4947 - protein, 95 aa, Thermosynechococcus elongatus; identical to SEQ ID NO: 4946

SEQ ID NO: 4948 - protein, 95 aa, Thermosynechococcus elongatus
ASVVPQERQQDTRKHYPNYKVIVLNDDFNTFRHVAAWLMKYIPNMTSDRAWELTNQVHYEGQAIVWVGPQEQAELYHEQLLRAGLTMAPLETEGS

SEQ ID NO: 4949 - protein, 95 aa, Thermosynechococcus elongatus; identical to SEQ ID NO: 4

SEQ ID NO: 4950 - protein, 95 aa, Thermosynechococcus elongatus; identical to SEQ ID NO: 16

SEQ ID NO: 4951 - protein, 95 aa, Thermosynechococcus elongatus; identical to SEQ ID NO: 109

SEQ ID NO: 4952 - protein, 95 aa, Thermosynechococcus elongatus; identical to SEQ ID NO: 577

SEQ ID NO: 4953 - protein, 95 aa, Thermosynechococcus elongatus
ASVVPQERQQDTRKHYPNYKVIVLNDDFNTFRHVAAFLMKYIPNKTSDRAWELTNQVHYEGQAIVWVGPQEQAELYHEQLLRAGLTMAPLEPEGS

SEQ ID NO: 4954 - protein, 95 aa, Thermosynechococcus elongatus
ASVVPQERQQDTRKHYPNYKVIVLNDDFNTFRHVAAFLMKYIPNMTSDRAWELTNQVHYEGQAIVWVGPQVQAELYHEQLLRAGLTMAPLEPGGS

SEQ ID NO: 4955 - protein, 95 aa, Thermosynechococcus elongatus
ASVVPQERQQDTRKHYPNYKVIVLNDDFNTFRHVAAFLMKYIPNMISDRAWELTNQVHYGGRAIVWVGPQEQAELYHEQLLRAGLTMAPLEPEGS

SEQ ID NO: 4956 - protein, 70 aa, Thermosynechococcus elongatus; identical to SEQ ID NO: 1505

SEQ ID NO: 4957 - protein, 36 aa, Thermosynechococcus elongatus; identical to SEQ ID NO: 556

SEQ ID NO: 4958 - protein, 95 aa, Thermosynechococcus elongatus; identical to SEQ ID NO: 2

SEQ ID NO: 4959 - protein, 95 aa, Thermosynechococcus elongatus; identical to SEQ ID NO: 2

SEQ ID NO: 4960 - protein, 95 aa, Thermosynechococcus elongatus
ASVVPQERQQDTRKHYPNYKVIVLNDDFNTFRHVAACLMKYIPNMTSDRAWELTNQVHYEGQAIVWVGPQVLAELYHEQLLRAGLTMAPLEPEGS

SEQ ID NO: 4961 - protein, 95 aa, Thermosynechococcus elongatus
ASVVPQERQQDTRKHYPNYKVIVLNDDFNTFRHVAACLMKYIPNMTSDRAWELTNLVHYAGQAIVWDGPQEQAELYHEQVLRAGLTMAPLEPEGS

SEQ ID NO: 4962 - protein, 95 aa, Thermosynechococcus elongatus
ASVVPQERQQDTRKHYPNYKVIVLNDDFNTFRHVAVCLMKYIPNMTSDRAWELTNQVHYEGQAIVWVGTQEQAELYHEQLLRAGLNMAPLEPEGS

SEQ ID NO: 4963 - protein, 95 aa, Thermosynechococcus elongatus; identical to SEQ ID NO: 744

SEQ ID NO: 4964 - protein, 95 aa, Thermosynechococcus elongatus
ASVVPQERQQDTRKHYPNYKVIVLNDDFNTFRHVAVCLMKYIPNMISDRAWELTNQVHYGGRAIVWVGPQEQAELYHEQLLRAGLTMAPLEPEGS

SEQ ID NO: 4965 - protein, 95 aa, Thermosynechococcus elongatus; identical to SEQ ID NO: 745

SEQ ID NO: 4966 - protein, 95 aa, Thermosynechococcus elongatus
ASVVPQERQQDTRKHYPNYKVIVLNDDFNTFRHVASCLMKYIPNMTSDRAWELTNQVHYGGRAIVWVGPQEQAELYHEQLLRAGLTMAPLEPEGS

SEQ ID NO: 4967 - protein, 95 aa, Thermosynechococcus elongatus
ASVVPQERQQDTRKHYPNYKVIVLNDDFNTFRHVVACLKKYIPNMTSDRACELTNQVHYEGQAIVWVGPQEQAELYHEQLLRAGLTMAPLEPEGS

SEQ ID NO: 4968 - protein, 95 aa, Thermosynechococcus elongatus; identical to SEQ ID NO: 63

SEQ ID NO: 4969 - protein, 95 aa, Thermosynechococcus elongatus
ASVVPQERQQDTRKHYPNYKVIVLNDDFNTFRHVVACLKKYIPNMISDRAWELTNQGHYGGRAIVWVGPQEQAELYHEQLLRAGLTMAPLEPGGS

SEQ ID NO: 4970 - protein, 95 aa, Thermosynechococcus elongatus
ASVVPQERQQDTRKHYPNYKVIVLNDDFNTFRHVVACLKKYIPNMISDRAWELTNQVHYKGQAIVWVGPQEQAELNHEQLLRAGLTMAPLEPEGS

SEQ ID NO: 4971 - protein, 95 aa, Thermosynechococcus elongatus; identical to SEQ ID NO: 63

SEQ ID NO: 4972 - protein, 90 aa, Thermosynechococcus elongatus
ASVVPQERQQDTRKHYPNYKVIVLNDDFNTFRHVVACLKKYIPNMISDRAWELTNQVHYGGRAIVWVGPQEQAELYHEQLLRAGLTMAPL

SEQ ID NO: 4973 - protein, 95 aa, Thermosynechococcus elongatus
ASVVPQERQQDTRKHYPNYKVIVLNDDFNTFRHVVACLKKYIPNMISDRAWELTNQVHYGGRAIVWVGPQEQAELYHEQLLRAGLTMSPLEPEGS

SEQ ID NO: 4974 - protein, 95 aa, Thermosynechococcus elongatus
ASVVPQERQQDTRKHYPNYKVIVLNDDFNTFRHVVACLKKYIPNMISDRAWELTNQVHYGGRAIVWVGPQEQAELYHEQLLRAGLTLAPLEPEGS

SEQ ID NO: 4975 - protein, 95 aa, Thermosynechococcus elongatus
ASVVPQERQQDTRKHYPNYKVIVLNDDFNTFRHVVACLKKYIPNMISDRAWELTNQVHYGGRAIVWVGPQEQAVLYHEQLLRAGLTMAPLEPEGS

SEQ ID NO: 4976 - protein, 95 aa, Thermosynechococcus elongatus
ASVVPQERQQDTRKHYPNYKVIVLNDDFNTFRHVVACLKKYIPNMISDRAWELTNQVHYGGRAIVWVGPQVQAELYHEQLLRAGLTMAPLEPEGS

SEQ ID NO: 4977 - protein, 95 aa, Thermosynechococcus elongatus
ASVVPQERQQDTRKHYPNYKVIVLNDDFNTFRHVVACLKKYIPNMISDRAWELTNQVHYGGLAIVWVGPQEQAELYHEQLLRAGLTMAPLEPEGS

SEQ ID NO: 4978 - protein, 95 aa, Thermosynechococcus elongatus
ASVVPQERQQDTRKHYPNYKVIVLNDDFNTFRHVVACLKKYIPNMISDIAWELTNQVHYGGRAIVWVGPQEQAELYHEQLLRAGLTMAPLEPEGS

SEQ ID NO: 4979 - protein, 95 aa, Thermosynechococcus elongatus
ASVVPQERQQDTRKHYPNYKVIVLNDDFNTFRHVVACLKKYIPNLISDRAWELTNQVHYGGRAIVWVGPQEQAELYHEQLLRAGLTMAPLEPEGS

SEQ ID NO: 4980 - protein, 95 aa, Thermosynechococcus elongatus
ASVVPQERQQDTRKHYPNYKVIVLNDDFNTFRHVVACLKKYIPNMTSDRAWELTNQVHYKGQAIVWVGPQEQAELNHEQLLRAGLTMAPLEPEGS

SEQ ID NO: 4981 - protein, 95 aa, Thermosynechococcus elongatus
ASVVPQERQQDTRKHYPNYKVIVLNDDFNTFRHVVACLKKYIPNMTSDRAWELTNQVHYGGRAIVWVGPQEQAELYHEQLLRAGLTMAPLEPEGS

SEQ ID NO: 4982 - protein, 95 aa, Thermosynechococcus elongatus
ASVVPQERQQDTRKHYPNYKVIVLNDDFNTFRHVVACLMKYIPNKTSDRAWELTNQVHYEGQAIVWVGPQEQAELYHEQLLRAGLTMAPLEPEGS

SEQ ID NO: 4983 - protein, 95 aa, Thermosynechococcus elongatus
ASVVPQERQQDTRKHYPNYKVIVLNDDFNTFRHVVACLMKYIPNMTSDRAWELTNQVHYEGQAIVWVGPQVQAELNHEQLLRAGLTMAPLEPEGS

SEQ ID NO: 4984 - protein, 95 aa, Thermosynechococcus elongatus
ASVVPQERQQDTRKHYPNYKVIVLNDDFNTFRHVVACLMKYIPNMTSDRAWELTNQVHYEGQAIVWVGPQVQAELYHEQLLRAGLTMAPLEPGGS

SEQ ID NO: 4985 - protein, 95 aa, Thermosynechococcus elongatus
ASVVPQERQQDTRKHYPNYKVIVLNDDFNTFRHVVACLMKYIPNMTSDRAWELTNQVHYKGQAIVWVGPQEQAELNHEQLLRAGLTMAPLEPEGS

SEQ ID NO: 4986 - protein, 95 aa, Thermosynechococcus elongatus
ASVVPQERQQDTRKHYPNYKVIVLNDDFNTFRHVVACFKKYIPNMISDRAWELTNQVHYGGRAIVWVGPQEQAELYHEQLLRAGLTMAPLEPEGS

SEQ ID NO: 4987 - protein, 95 aa, Thermosynechococcus elongatus
ASVVPQERQQDTRKHYPNYKVIVLNDDFNTFRHVSACLMKYIPNMTSDRAWELTNQVHYEGQAIVRVGPQEQAELYHKQLLRAGLTMAPLEPEGS

SEQ ID NO: 4988 - protein, 95 aa, Thermosynechococcus elongatus
ASVVPQERQQDTRKHYPNYKVIVLNDDFNTFRHVSACLMKYIPNMTSDRAWELTNQVHYEGQAIVWVGPQEQAELYHEQLLRAGLTRAPLEPEGS

SEQ ID NO: 4989 - protein, 95 aa, Thermosynechococcus elongatus
ASVVPQERQQDTRKHYPNYKVIVLNDDFNTFRHVSACLMKYIPNMTSDRAWELTNQVHYEGQAIVWVGPQEQAELYHEQLLRAGLTMAPLEPEGS

SEQ ID NO: 4990 - protein, 95 aa, Thermosynechococcus elongatus; identical to SEQ ID NO: 4989

SEQ ID NO: 4991 - protein, 95 aa, Thermosynechococcus elongatus
ASVVPQERQQDTRKHYPNYKVIVLNDDFNTFRHVSACLMKYIPNMTSDRAWELTNQVHYEGQAIVWVGPQEQAELYHEQFLRAGLTMAPLEPEGS

SEQ ID NO: 4992 - protein, 95 aa, Thermosynechococcus elongatus
ASVVPQERQQDTRKHYPNYKVIVLNDDFNTFRHVSACLMKYIPNMTSDRAWELTNQVHYEGQAIVWVGPQVQAELYHEQLLRAGLTMAPLEPEGS

SEQ ID NO: 4993 - protein, 95 aa, Thermosynechococcus elongatus
ASVVPQERQQDTRKHYPNYKVIVLNDDFNTFRHVSACLMKYIPNMTSYRAWELTNQVHYEGQAIVWVGPQEQAELYHEQLLRAGLTMAPLEPEGS

SEQ ID NO: 4994 - protein, 95 aa, Thermosynechococcus elongatus
ASVVPQERQQDTRKHYPNYKVIVLNDDFNTFRHYAACLMKYIPNMTSDRAWELTNQVHYEGQAIVWVGPQEQAELYHEQLLRAGLTMAPLDPEGS

SEQ ID NO: 4995 - protein, 95 aa, Thermosynechococcus elongatus
ASVVPQERQQDTRKHYPNYKVIVLNDDFNTFRHYAACLMKYIPNMTSDRAWELTNQVLYEGQAIVWVGPQEQAELYHEQLLRAGLTLAPLEPEGS

SEQ ID NO: 4996 - protein, 36 aa, Thermosynechococcus elongatus
ASVVPQERQQDTRKHYPNYKVIVLNDDFNTFRHFAA

SEQ ID NO: 4997 - protein, 95 aa, Thermosynechococcus elongatus
ASVVPQERQQDTRKHYPNYKVIVLNDDFNTFRHFAACLMKYIPNKTSDRAWELTNKVHYEGLAIVWVGPQEQAELYHEQLLRAGLTMAPLEPEGS

SEQ ID NO: 4998 - protein, 95 aa, Thermosynechococcus elongatus
ASVVPQERQQDTRKHYPNYKVIVLNDDFNTFRHFAACLMKYIPNKTSDRAWELTNQVQYEGQAIVWVGPQEQAELYHEQLLRAGLTMAPLEPEGS

SEQ ID NO: 4999 - protein, 58 aa, Thermosynechococcus elongatus
ASVVPQERQQDTRKHYPNYKVIVLNDDFNTFRHFAACLMKYIPNKTSDRAWELTNQVH

SEQ ID NO: 5000 - protein, 95 aa, Thermosynechococcus elongatus
ASVVPQERQQDTRKHYPNYKVIVLNDDFNTFRHFAACLMKYIPNKTSDRAWELTNQVHYEGQAIVWVGTQEQAELYHEQLLRAGLTMAPLEPEGS

SEQ ID NO: 5001 - protein, 90 aa, Thermosynechococcus elongatus
ASVVPQERQQDTRKHYPNYKVIVLNDDFNTFRHFAACLMKYIPNKTSDRAWELTNQVHYEGQAIVWVGPQEQAELYHEQLLRAGLTMAPL

SEQ ID NO: 5002 - protein, 95 aa, Thermosynechococcus elongatus
ASVVPQERQQDTRKHYPNYKVIVLNDDFNTFRHFAACLMKYIPNKTSDRAWELTNQVHYEGRAIVWVGPQEQAELYHEQLLRAGLTMAPLEPEGS

SEQ ID NO: 5003 - protein, 95 aa, Thermosynechococcus elongatus
ASVVPQERQQDTRKHYPNYKVIVLNDDFNTFRHFAACLMKYIPNMTSDRAWELTNQVHYEGQAIVWVGPQEQAELYHEQVLRAGLTMAPLEPGGS

SEQ ID NO: 5004 - protein, 95 aa, Thermosynechococcus elongatus; identical to SEQ ID NO: 411

SEQ ID NO: 5005 - protein, 95 aa, Thermosynechococcus elongatus; identical to SEQ ID NO: 411

SEQ ID NO: 5006 - protein, 95 aa, Thermosynechococcus elongatus
ASVVPQERQQDTRKHYPNYKVIVLNDDFNTFRHFAACLMKYIPNMTSDRAWELTNHVHFEVLAIVWVGPLEQAELLQDQLLRAGLSLAPLDPEGS

SEQ ID NO: 5007 - protein, 93 aa, Thermosynechococcus elongatus
ASVVPQERQQDTRKHYPNYKVIVLNDDFNTFRHFAACLMKYIPNMTSDRACELTNQVHYKGQAIVLVGPQEQAELYQEQLLRAGLTMAPLEPE

SEQ ID NO: 5008 - protein, 95 aa, Thermosynechococcus elongatus
ASVVPQERQQDTRKHYPNYKVIVLNDDFNTFRHFAACLMKYIPNMTSDRACELTNQVHYEGQAIVWVGPQVQAELYHEQLLRAGLTMSPLEPGGS

SEQ ID NO: 5009 - protein, 95 aa, Thermosynechococcus elongatus; identical to SEQ ID NO: 3941

SEQ ID NO: 5010 - protein, 95 aa, Thermosynechococcus elongatus; identical to SEQ ID NO: 16

SEQ ID NO: 5011 - protein, 95 aa, Thermosynechococcus elongatus
ASVVPQERQQDTRKHYPNYKVIVLNDDFNTFRRVAACLMKYIPNMISDRAWELTNQVHYGGRAIVWVGPQEQAELYHEQLLRAGLTMAPLEPEGS

SEQ ID NO: 5012 - protein, 95 aa, Thermosynechococcus elongatus
ASVVPQERQQDTRKHYPNYKVIVLNDDFNTFRLVAACLMKYIPNMTSDRAWELTNQVHYEGQAIVWVGPQEQAELYHEQLLRAGLTMAPLEPEGS

SEQ ID NO: 5013 - protein, 95 aa, Thermosynechococcus elongatus
ASVVPQERQQDTRKHYPNYKVIVLNDDFNTFRLVAACLMKYIPHKTSDRAWELTNQGHDDGQAIVWVGPQEPAEVYHEQLLRAGLTIAPLEPEGS

SEQ ID NO: 5014 - protein, 95 aa, Thermosynechococcus elongatus
ASVVPQERQQDTRKHYPNYKVIVLNDDFNTFRDVAACLMKYIPNKTSDRAWELTNQVHYEGQAIVWVGPQEQAELYHEQLLRAGLTMAPLEPEGS

SEQ ID NO: 5015 - protein, 95 aa, Thermosynechococcus elongatus
ASVVPQERQQDTRKHYPNYKVIVLNDDFNTFRYVAACLMKYIPNKTSDRAWELTNQVHYEGQAIVWVGPQEQAELYHEQLLRAGLTMAPLEPEGS

SEQ ID NO: 5016 - protein, 95 aa, Thermosynechococcus elongatus
ASVVPQERQQDTRKHYPNYKVIVLNDDFNTFRYVAACLMKYIPNMTSDRAWELTNQVHYEGQAIVWVGPQEQAELYHEQLLRAGLTMAPLEPEGS

SEQ ID NO: 5017 - protein, 95 aa, Thermosynechococcus elongatus; identical to SEQ ID NO: 5016

SEQ ID NO: 5018 - protein, 95 aa, Thermosynechococcus elongatus
ASVVPQERQQDTRKHYPNYKVIVLNDDFNTFRHVAACLMKYIPNLTSDRAWDLTNQVHYGGRAIVWVGPQEQAALYHEPLLRAGLTMAPLEPEGS

SEQ ID NO: 5019 - protein, 95 aa, Thermosynechococcus elongatus; identical to SEQ ID NO: 2

SEQ ID NO: 5020 - protein, 95 aa, Thermosynechococcus elongatus
ASVVPQERQQDTRKHYPNYKVIVLNDDFNTFLHVAACLKKYIPNMISDRAWELTNQVHYGGRAIVWVGPQEQAELYHEQLLRAGLTMAPLEPEGS

SEQ ID NO: 5021 - protein, 95 aa, Thermosynechococcus elongatus
ASVVPQERQQDTRKHYPNYKVIVLNDDFNTFLHVAACLMKYIPNKTSDRAWELTNQVHYEGQAIVWVGPQEQAELYHEQLLRAGLTMAPLEPEGS

SEQ ID NO: 5022 - protein, 95 aa, Thermosynechococcus elongatus
ASVVPQERQQDTRKHYPNYKVIVLNDDFNTFLHVAACLMKYIPNKTSDRAWELTNQVHYEGQAIVWVGPQEQAELYHEQLLRAGLTMAPLEPDGS

SEQ ID NO: 5023 - protein, 95 aa, Thermosynechococcus elongatus
ASVVPQERQQDTRKHYPNYKVIVLNDDFNTFLHVAACLMKYIPNKTSDRAWELTNQVHYEGQAIVWVGPQVQAELYHEQLLRAGLTMAPLEPKGS

SEQ ID NO: 5024 - protein, 95 aa, Thermosynechococcus elongatus
ASVVPQERQQDTRKHYPNYKVIVLNDDFNTFLHVAACLMKYIPNMNSDRAWELTNQVHYVGLAIVWVGPQVQAELYHEQLLRAGLTMAPMEPVGS

SEQ ID NO: 5025 - protein, 80 aa, Thermosynechococcus elongatus
ASVVPQERQQDTRKHYPNYKVIVLNDDFNTFLHVAACLMKYIPNMTSDRAWELTNQVHYEGQAIVWVGPQVQAELYHEQL

SEQ ID NO: 5026 - protein, 95 aa, Thermosynechococcus elongatus
ASVVPQERQQDTRKHYPNYKVIVLNDDFNTFLHVAACLMKYIPNMTSDRAWELTNQVHYEGQAIVWVGPQVQAELYHEQLLRAGLTMATLEPEGS

SEQ ID NO: 5027 - protein, 95 aa, Thermosynechococcus elongatus
ASVVPQERQQDTRKHYPNYKVIVLNDDFNTFLHVAACLMKYIPNMTSDRAWELTNQVHYVGRAIVWVGPQEQAELYHEQLLRAGLTMAPLEPEGS

SEQ ID NO: 5028 - protein, 95 aa, Thermosynechococcus elongatus
ASVVPQERQQDTRKHYPNYKVIVLNDDFNTFLHVGACLMKYIPNMTSDRAWELTNQVHYTGLAIVWVGPQEQAELNHEQLLRAGLTMAPLEPEGS

SEQ ID NO: 5029 - protein, 95 aa, Thermosynechococcus elongatus
ASVVPQERQQDTRKHYPNYKVIVLNDDFNTFLHVSACLMKYIPNKTSDRAWELTNQVHYEGQAIVWVVPQEQAELYHEQLLRAGLTMAPLEPEGS

SEQ ID NO: 5030 - protein, 31 aa, Thermosynechococcus elongatus
ASVVPQERQQDTRKHYPNYKVIVLNDDFNTF

SEQ ID NO: 5031 - protein, 95 aa, Thermosynechococcus elongatus; identical to SEQ ID NO: 16

SEQ ID NO: 5032 - protein, 95 aa, Thermosynechococcus elongatus; identical to SEQ ID NO: 1571

SEQ ID NO: 5033 - protein, 95 aa, Thermosynechococcus elongatus
ASVVPQERQQDTRKHYPNYKVIVLNDDFNIFRHVAACLMKYIPNMTSDRAWELTNQVHYEGQAIVWVGPQEQAELYHEQLLRAGLTMAPLEPEGS

SEQ ID NO: 5034 - protein, 95 aa, Thermosynechococcus elongatus
ASVVPQERQQDTRKHYPNYKVIVLNDDFNAFRHVAACLMKYIPNKTSNRAWELTNQVHYEGQAIVWVGPQEQAELYHEQLLRAGLTMAPLEPEGS

SEQ ID NO: 5035 - protein, 95 aa, Thermosynechococcus elongatus
ASVVPQERQQDTRKHYPNYKVIVLNDDFNAFRHVAACLMKYIPNKTSDRAWELTNQVHYEGQAIVWVGPQEQAELYHEQLLRAGLTMAPLEPEGS

SEQ ID NO: 5036 - protein, 95 aa, Thermosynechococcus elongatus
ASVVPQERQQDTRKHYPNYKVIVLNDDFNAFRHVAACLMKYIPNMTSDRAWELTNQVHYEGQAIVWVGPQEQAELYHEQLLRAGLTMAPLEPEGS

SEQ ID NO: 5037 - protein, 36 aa, Thermosynechococcus elongatus
ASVVPQERQQDTRKHYPNYKVIVLNDDFNSFRHVAA

SEQ ID NO: 5038 - protein, 95 aa, Thermosynechococcus elongatus
ASVVPQERQQDTRKHYPNYKVIVLNDDFNSFRHVAACLMKYIPNMTSDRAWELTNQVHYEGQAIVWVGPQEQAELYHEQLLRAGLTIAQLEREGS

SEQ ID NO: 5039 - protein, 95 aa, Thermosynechococcus elongatus; identical to SEQ ID NO: 4

SEQ ID NO: 5040 - protein, 95 aa, Thermosynechococcus elongatus; identical to SEQ ID NO: 2

SEQ ID NO: 5041 - protein, 95 aa, Thermosynechococcus elongatus; identical to SEQ ID NO: 18

SEQ ID NO: 5042 - protein, 95 aa, Thermosynechococcus elongatus
ASVVPQERQQDTRKHYPNYKVIVLNDDFITFQHVVACLKKYIPNMISDRAWELTNQVHYEGQAIVLVGPQVQAELYHEQLLRAGLTMAPLEPGGS

SEQ ID NO: 5043 - protein, 95 aa, Thermosynechococcus elongatus
ASVVPQERQQDTRKHYPNYKVIVLNDDFITFRHVAACLMKYIPNKTSDRAWELTNQVHYEGQAIVWVGPQEQAELYHEQLLRAGLTMAPLEPEGS

SEQ ID NO: 5044 - protein, 95 aa, Thermosynechococcus elongatus
ASVVPQERQQDTRKHYPNYKVIVLNDDFITFRHVAACLMKYIPNKTSDRAWELTNQVHYEGQAIVWVGPQEQAELYHEQLLRAGLTIAPLEPEGS

SEQ ID NO: 5045 - protein, 95 aa, Thermosynechococcus elongatus
ASVVPQERQQDTRKHYPNYKVIVLNDDFITFRHVAACLMKYIPNKTSDRAWELTNQVHYEGQAIVWVGPQEQAELYHEQLLRACLTMAPLEPEGS

SEQ ID NO: 5046 - protein, 95 aa, Thermosynechococcus elongatus; identical to SEQ ID NO: 1625

SEQ ID NO: 5047 - protein, 95 aa, Thermosynechococcus elongatus
ASVVPQERQQDTRKHYPNYKVIVLNDDFITFRHVAACLMKYIPNMTSDRAWELTNQVHYEGQAIVWVGPQKQAELYHEQLLRAGLTMAPLEPEGS

SEQ ID NO: 5048 - protein, 95 aa, Thermosynechococcus elongatus
ASVVPQERQQDTRKHYPNYKVIVLNDDFITFRHVAACLMKYIPNMTSDRAWELTNQVHYEGQAIVWVCPQEQAELYHEQLLRAGLTMSPLEPEGS

SEQ ID NO: 5049 - protein, 95 aa, Thermosynechococcus elongatus
ASVVPQERQQDTRKHYPNYKVIVLNDDFITFRHVAACLMKYIPNMTSDRAWELTNQVHYGGRAIVWVGPQEQAELYHEQLLRAGLTMAPLEQEGS

SEQ ID NO: 5050 - protein, 95 aa, Thermosynechococcus elongatus
ASVVPQERQQDTRKHYPNYKVIVLNDDFITFLHVAACLMKYIPNMTSDRAWELTNQVHYEGQAIVWVGPQEQAELYHEQLLRAGLTMAPLEPEGS

SEQ ID NO: 5051 - protein, 95 aa, Thermosynechococcus elongatus
ASVVPQERQQDTRKHYPNYKVIVLNDDFDTFRHVAACLMKYIPNMTSDRAWELTNQVHYEGQAIVWVGPQEQAELYHEQLLRAGLTMAPLEPEGS

SEQ ID NO: 5052 - protein, 95 aa, Thermosynechococcus elongatus
ASVVPQERQQDTRKHYPNYKVIVLNDDFDTFRHVAACLMKYIPNMTSDRAWELTNQVHYEGQAIVWVGPQVQAELYHEQLLRAGLTMAPLEPGGS

SEQ ID NO: 5053 - protein, 95 aa, Thermosynechococcus elongatus
ASVVPQERQQDTRKHYPNYKVIVLNDDFYTFRHVAACLMKYIPNMTSDRAWELTNQVHYQGQAIVWVCPQEQAELYHEQLLRAGLTMAPFEPEGS

SEQ ID NO: 5054 - protein, 95 aa, Thermosynechococcus elongatus
ASVVPQERQQDTRKHYPNYKVIVLNDDFYTFRHVAACLMKYIPNMTSDRAWELTNQVHYEGQAIVWVGPQEQAELYHEQLMRAGLTMAPLEPEGS

SEQ ID NO: 5055 - protein, 95 aa, Thermosynechococcus elongatus; identical to SEQ ID NO: 1031

SEQ ID NO: 5056 - protein, 95 aa, Thermosynechococcus elongatus
ASVVPQERQQDTRKHYPNYKVIVLNDDFYTFRHVAACLMKYIPNMTSDRAWELTNQVHYGGRAIVWVGPQEQAELYHEQLLRAGLTMAPLEPEGS

SEQ ID NO: 5057 - protein, 95 aa, Thermosynechococcus elongatus
ASVVPQERQQDTRKHYPNYKVIVLNDDFYTFRHVAACLMKYIPHMTSDRAWELTNQVHYEGQAIVWVGPQEQAELYHEQLLRAGLTLAPLEPEGS

SEQ ID NO: 5058 - protein, 37 aa, Thermosynechococcus elongatus
ASVVPQERQQDTRKHYPNYKVIVLNDDFFTFGHVAAC

SEQ ID NO: 5059 - protein, 95 aa, Thermosynechococcus elongatus; identical to SEQ ID NO: 12

SEQ ID NO: 5060 - protein, 95 aa, Thermosynechococcus elongatus; identical to SEQ ID NO: 76

SEQ ID NO: 5061 - protein, 95 aa, Thermosynechococcus elongatus; identical to SEQ ID NO: 4

SEQ ID NO: 5062 - protein, 95 aa, Thermosynechococcus elongatus; identical to SEQ ID NO: 4

SEQ ID NO: 5063 - protein, 95 aa, Thermosynechococcus elongatus; identical to SEQ ID NO: 16

SEQ ID NO: 5064 - protein, 95 aa, Thermosynechococcus elongatus; identical to SEQ ID NO: 7

SEQ ID NO: 5065 - protein, 95 aa, Thermosynechococcus elongatus; identical to SEQ ID NO: 113

SEQ ID NO: 5066 - protein, 95 aa, Thermosynechococcus elongatus; identical to SEQ ID NO: 2

SEQ ID NO: 5067 - protein, 95 aa, Thermosynechococcus elongatus
ASVVPQERQQDTRKHYPNYKVIVLNDGFNTFRHVAACLMKYIPNMTSDRAWELTNQVHYEGQAIVWVGPQEQAELNHEQLLRAGLTMAPLEPEGS

SEQ ID NO: 5068 - protein, 95 aa, Thermosynechococcus elongatus
ASVVPQERQQDTRKHYPNYKVIVLNDGFNTFRHVAACLMKYIPNMTSDRAWELTNQVHYEGQAIVWVGPQEQAELYHEQLLRAGLTMAPLEPEGS

SEQ ID NO: 5069 - protein, 95 aa, Thermosynechococcus elongatus
ASVVPQERQQDTRKHYPNYKVIVLNDGFNTFRHVVACLKKYIPNMISDRAWELTNQVHYGGRAIVWVGPQEQAELYHEQLLRAGLTMAPLEPEGS

SEQ ID NO: 5070 - protein, 95 aa, Thermosynechococcus elongatus
ASVVPQERQQDTRKHYPNYKVIVLNDVFNTFRHVAVCLMKYIPNMTSDRAWELTNQVHYEGQAIVWVGPQEQAELYHEQLLRAGLTMAPLEPEGS

SEQ ID NO: 5071 - protein, 95 aa, Thermosynechococcus elongatus
ASVVPQERQQDTRKHYPNYKVIVLNDYLNTIRHVAACLMKYIPNMTSDRAWELTNQVHYEGLAIVWVGPLVQAELYHEQLLRAGLTMAPLEPEGS

SEQ ID NO: 5072 - protein, 36 aa, Thermosynechococcus elongatus
ASVVPQERQQDTRKHYPNYKVIVLNDYFNTFRHVDA

SEQ ID NO: 5073 - protein, 95 aa, Thermosynechococcus elongatus
ASVVPQERQQDTRKHYPNYKVIVLNDYFNTFRHVAACLMKYIPNKTSDRAWELTNQVHYEGQAIVWVGPQEQAELYHEQLLRAGLTMAPLEPGGS

SEQ ID NO: 5074 - protein, 95 aa, Thermosynechococcus elongatus
ASVVPQERQQDTRKHYPNYKVIVLNDYFNTFRHVAACLMKYIPNMTSDRAWELTNQVHYEGQAIVWVGPQEQAELYHEQLLRAGLTMAPLEPGGS

SEQ ID NO: 5075 - protein, 95 aa, Thermosynechococcus elongatus
ASVVPQERQQDTRKHYPNYKVIVLNDYFNTFRHVAACLMKYIPNMTSDRAWELTNQVHYKGQAIVWVGPQEQAELNHEQLLRAGLTMAPLEPEGS

SEQ ID NO: 5076 - protein, 95 aa, Thermosynechococcus elongatus; identical to SEQ ID NO: 4

SEQ ID NO: 5077 - protein, 95 aa, Thermosynechococcus elongatus
ASVVPQERQQDTRKHYPNYKVIVLNGDFNTFRHVAACLMKYIPNKTSDRAWELTNQVHYEGQAIVWVGPQEQAELYHEQLLRAGLTMAPLEPEGS

SEQ ID NO: 5078 - protein, 95 aa, Thermosynechococcus elongatus
ASVVPQERQQDTRKHYPNYKVIVLNGDFNTFRHVAACLMKYIPNMTSDRAWELTNQVHYEGQAIVWVGPQEQAELYHEQLLRAGLTMAPLEPEGS

SEQ ID NO: 5079 - protein, 95 aa, Thermosynechococcus elongatus; identical to SEQ ID NO: 1632

SEQ ID NO: 5080 - protein, 95 aa, Thermosynechococcus elongatus
ASVVPQERQQDTRKHYPNYKVIVLNVDFNTFRHVAACLMKYIPNMTSDRAWELTNQVHYEGQAIVWVGPQEQAELYHEQLLRACLTMAPLEPEGS

SEQ ID NO: 5081 - protein, 36 aa, Thermosynechococcus elongatus
ASVVPQERQQDTRKHYPNYKVIVLNYDFNTFRHVAA

SEQ ID NO: 5082 - protein, 95 aa, Thermosynechococcus elongatus
ASVVPQERQQDTRKHYPNYKVIVLNYDFNTFRHVAACLMKYIPNKTSDRAWELTNQVHYEGQAIVWVGPQVQAELYHEQLLRAGLTMAPLEPGGS

SEQ ID NO: 5083 - protein, 95 aa, Thermosynechococcus elongatus; identical to SEQ ID NO: 412

SEQ ID NO: 5084 - protein, 95 aa, Thermosynechococcus elongatus
ASVVPQERQQDTRKHYPNYKVIVLNYDFNTFRHVAACLMKYIPNMTSDRAWELTNQVHYEGLAIVWVGPQEQAELYHEQLLRAGLTMAPLEPEGS

SEQ ID NO: 5085 - protein, 95 aa, Thermosynechococcus elongatus; identical to SEQ ID NO: 37

SEQ ID NO: 5086 - protein, 95 aa, Thermosynechococcus elongatus; identical to SEQ ID NO: 2

SEQ ID NO: 5087 - protein, 95 aa, Thermosynechococcus elongatus; identical to SEQ ID NO: 2

SEQ ID NO: 5088 - protein, 95 aa, Thermosynechococcus elongatus
ASVVPQERQQDTRKHYPNYKVIVLSDDFNTFRHVAACLMKYIPNMTSDRAWELTNQVHYEGQAIVWVGPQEQAELYHEQLLRAGLTMAPLEPEGS

SEQ ID NO: 5089 - protein, 95 aa, Thermosynechococcus elongatus
ASVVPQERQQDTRKHYPNYKVIVLSDDFNTFRHVAACLMKYIPNMTSDRAWELTNQVHYEGQAIVWVGPQVQAELYHEQLLRAGLTMAPLEPEGS

SEQ ID NO: 5090 - protein, 95 aa, Thermosynechococcus elongatus
ASVVPQERQQDTRKHYPNYKVIVLDDDFNTFRHVAACLMKYIPNKTSDRAWELTNQVHYEGQAIVWVGPQAQAELYHEQLLRAGLTMAPLEPEGS

SEQ ID NO: 5091 - protein, 95 aa, Thermosynechococcus elongatus
ASVVPQERQQDTRKHYPNYKVIVLYDDFNTFRHVAACLMKYIPNKTSDRAWELTNQVHYEGQAIVWVGPQEQAELYHEQLLRAGLTMATLEPEGS

SEQ ID NO: 5092 - protein, 95 aa, Thermosynechococcus elongatus
ASVVPQERQQDTRKHYPNYKVIVLYDDFNTFRHVAACLMKYIPNMTSDRAWELTNQVHYEGQAIVWVGPQEQAELYHEQLLRAGLTMAPLEPEGS

SEQ ID NO: 5093 - protein, 95 aa, Thermosynechococcus elongatus
ASVVPQERQQDTRKHYPNYKVIVLYDDFNTFRHVAACLMKYIPNMTSDRAWELTNHVHYEGQAIVWVGPPEQAELYHEQLLRAGLTMAPLEPEGS

SEQ ID NO: 5094 - protein, 95 aa, Thermosynechococcus elongatus
ASVVPQERQQDTRKHYPNYKVIVLYDDFNTFRHVAACLMKYIPNMTSDRAWELTNQVHYKGQAIVWVGPQEQAELNHEQLLRAGLTMAPLEPEGS

SEQ ID NO: 5095 - protein, 95 aa, Thermosynechococcus elongatus
ASVVPQERQQDTRKHYPNYKVIVFNDDFNTFQHVVACLKKYIPNMISDRAWELTNQVHYGGRAIVWVGPQEQAELYHEQLLRAGLTMAPLEPEGS

SEQ ID NO: 5096 - protein, 95 aa, Thermosynechococcus elongatus
ASVVPQERQQDTRKHYPNYKVIVFNDDFNTFRHVAACLMKYIPNMTSDRAWELTNQVHYEGQAIVWVGPQEQAELYHEQLLRTGLTMAPLEPEGS

SEQ ID NO: 5097 - protein, 95 aa, Thermosynechococcus elongatus
ASVVPQERQQDTRKHYPNYKVIVFNDDFNTFRHVAACLMKYIPNMTSDRAWELTNQVHYEGQAIVWVGPQEQAELYHEQLLRAGLTRAPLEPEGS

SEQ ID NO: 5098 - protein, 95 aa, Thermosynechococcus elongatus
ASVVPQERQQDTRKHYPNYKVIVFNDDFNTFRHVAACLMKYIPNMTSDRAWELTNQVHYEGQAIVWVGPQEQAELYHEQLLRAGLTMAQLEPGGS

SEQ ID NO: 5099 - protein, 95 aa, Thermosynechococcus elongatus
ASVVPQERQQDTRKHYPNYKVIVFNDDFNTFRHVAACLMKYIPNMTSDRAWELTNQVHYEGQAIVWVGPQEQAELYHEQLLRAGLTMAPLEPGGS

SEQ ID NO: 5100 - protein, 95 aa, Thermosynechococcus elongatus
ASVVPQERQQDTRKHYPNYKVIVFNDDFNTFRHVAACLMKYIPNMTSDRAWELTNQVHYEGQAIVWVGPQVQAELYHEQLLRAGLTMAPLEPEGS

SEQ ID NO: 5101 - protein, 95 aa, Thermosynechococcus elongatus
ASVVPQERQQDTRKHYPNYKVIVFNDDFNTFRHVAACLMKYIPNMTSDRAWELTNQVHYKGQAIVWVGPQEQAELNHEQLLRAGLTMAPLEPEGS

SEQ ID NO: 5102 - protein, 95 aa, Thermosynechococcus elongatus; identical to SEQ ID NO: 749

SEQ ID NO: 5103 - protein, 95 aa, Thermosynechococcus elongatus
ASVVPQERQQDTRKHYPNYKVIFLNDDINTFRHVAACLMKYIPNMTSDRAWELTNQVHYEGQAIVWVGPQEQAELYHEQLLRAGLTMAPLEPEGS

SEQ ID NO: 5104 - protein, 95 aa, Thermosynechococcus elongatus
ASVVPQERQQDTRKHYPNYKVIFLNDDFNTIRHVAACLMKYIPNKTSDRAWELTNKVHYEGQAIVCVGPLEQAELYHEQLLRAGLTMAPLEPEGS

SEQ ID NO: 5105 - protein, 59 aa, Thermosynechococcus elongatus
ASVVPQERQQDTRKHYPNYKVIFLNDDFNTFRHVAACLMKYIPNMTSDRAWELTNQVHY

SEQ ID NO: 5106 - protein, 95 aa, Thermosynechococcus elongatus
ASVVPQERQQDTRKHYPNYKVIFLNDDFNTFRHVAACLMKYIPNMTSDRAWELTNQVHYEGQAIVGVGPQVQAELYHEQLLRAGLTMAPLEPGGS

SEQ ID NO: 5107 - protein, 95 aa, Thermosynechococcus elongatus
ASVVPQERQQDTRKHYPNYKVIFLNDDFNTFRHVAACLMKYIPNMTSDRAWELTNQVHYEGQAIVWVGPQEQAELYHEQLLRAGLTMAPLEPEGS

SEQ ID NO: 5108 - protein, 95 aa, Thermosynechococcus elongatus
ASVVPQERQQDTRKHYPNYKVIFLNDDFNTFRHVAACLMKYIPNMTSDRAWELTNQVHYEGQAIVWVGPQVQAELYHEQLLRAGLTMAPLEPGGS

SEQ ID NO: 5109 - protein, 95 aa, Thermosynechococcus elongatus
ASVVPQERQQDTRKHYPNYKVMVLNDDFNTFRHVAACLMKYIPNKTSDRAWELTNQVHYEGQAIVWVGPQEQAELYHEQLLRAGLTMAPLEPEGS

SEQ ID NO: 5110 - protein, 95 aa, Thermosynechococcus elongatus
ASVVPQERQQDTRKHYPNYKVMVLNDDFNTFRHVVACLKKYIPNMISDRAWELTNQVHYGGRAIVWVGPQEQAELYHEQLLRAGLTMAPLEPEGS

SEQ ID NO: 5111 - protein, 95 aa, Thermosynechococcus elongatus; identical to SEQ ID NO: 2

SEQ ID NO: 5112 - protein, 95 aa, Thermosynechococcus elongatus; identical to SEQ ID NO: 18

SEQ ID NO: 5113 - protein, 95 aa, Thermosynechococcus elongatus
ASVVPQERQQDTRKHYPNYKVLVVNDDFNTFRHVAACLMKYLPNKTSDRAWELTNQVHYEGQAIVWVGPQEQAELYPEQLLRAGLTMAPLEPEGS

SEQ ID NO: 5114 - protein, 95 aa, Thermosynechococcus elongatus
ASVVPQERQQDTRKHYPNYKVLVLNDDFNTFRHVAACLMKYIPNMISDRAWELTNQVHYGGRAIVWVGPQEQAELYHEQLLRAGLTMAPLEPEGS

SEQ ID NO: 5115 - protein, 95 aa, Thermosynechococcus elongatus
ASVVPQERQQDTRKHYPNYKVLVLNDDFNTFRHVAACLMKYIPNKTSDRAWELTNQVHYVGQAIVWVGPQERAELYHEQLLRAGLTMAPLEPEGS

SEQ ID NO: 5116 - protein, 95 aa, Thermosynechococcus elongatus
ASVVPQERQQDTRKHYPNYKVLVLNDDFNTFRHVAACLMKYIPNMTSDRAWELTNQVHYEGQAIVWVGPQEQAELYHEQLLRAGLTRAPLEPEGS

SEQ ID NO: 5117 - protein, 95 aa, Thermosynechococcus elongatus
ASVVPQERQQDTRKHYPNYKVLVLNDDFNTFRHVAACLMKYIPNMTSDRAWELTNQVHYEGQAIVWVGPQEQAELYHEQLLRAGLTMAPLEPEGS

SEQ ID NO: 5118 - protein, 95 aa, Thermosynechococcus elongatus
ASVVPQERQQDTRKHYPNYKVLVLNDDFNTFRHVAACLMKYIPNMTSDRAWELTNQVHYEGQAIVWVGPQEQAELYHEHLLRAGLTMAPLEPEGS

SEQ ID NO: 5119 - protein, 95 aa, Thermosynechococcus elongatus
ASVVPQERQQDTRKHYPNYKVLVLNDDFITFRHVAACLMKYIPNMTSDRAWELTNQVHYEGQAIVWVGPQEHAELYHEQLVRAGLTMAPLEPEGS

SEQ ID NO: 5120 - protein, 95 aa, Thermosynechococcus elongatus
ASVVPQERQQDTRKHYPNYKVVVLNDDFNTFRHVAACLMKYIPNMTSDRAWELTNQVHYEGQAIVWVGPQEQAELYHEQLLRAGLTMAPLEPEGS

SEQ ID NO: 5121 - protein, 95 aa, Thermosynechococcus elongatus
ASVVPQERQQDTRKHYPNYKVVVLNDDFNTFRHVAACLMKYILNMTSDRAWELTNPVHYEGQAIVWVGPQEQAELYHEQLLRAGLTMAPLEPEGS

SEQ ID NO: 5122 - protein, 75 aa, Thermosynechococcus elongatus
ASVVPQERQQDTRKHYPNYKYIVLNDDYNTIRHDAACLMKYIPNMTSDRAWELTNQVHFEGLAIVCVGPQEQAEL

SEQ ID NO: 5123 - protein, 23 aa, Thermosynechococcus elongatus
ASVVPQERQQDTRKHYPNYKLIV

SEQ ID NO: 5124 - protein, 95 aa, Thermosynechococcus elongatus
ASVVPQERQQDTRKHYPNYKFIVLNDDFNTFQHVVACLKKYIPNMISDRAWELTNQVHYGGRAIVWVGPQEQAELYHEQLLRAGLTMAPLEPEGS

SEQ ID NO: 5125 - protein, 75 aa, Thermosynechococcus elongatus
ASVVPQERQQDTRKHYPNYKFIVLNDDFNTFRHVAACLMKYIPNMTSDRAWELTNQVHYEGQAIVWVGPQEQAEL

SEQ ID NO: 5126 - protein, 95 aa, Thermosynechococcus elongatus
ASVVPQERQQDTRKHYPNYKFIVLNDDFNTFRHVAACLMKYIPNMTSDRAWELTNQVHYEGQAIVWVGPQEQAELYHEQLLRAGLTMAPLEPEGS

SEQ ID NO: 5127 - protein, 95 aa, Thermosynechococcus elongatus
ASVVPQERQQDTRKHYPNYKFIVLNDDFNTFRHVAACLMKYIPNMTSDRALELTNQVHYKGQAIVWVGPQEQAELNHEQLLRAGLTMAPLEPEGS

SEQ ID NO: 5128 - protein, 95 aa, Thermosynechococcus elongatus
ASVVPQERQQDTRKHYPNYKFIVLNDDFNTFRHFAACLMKYIPNKTSDRAWELTNQVHYEGQAIVWVGPQEQAELYHEQLLRAGLTMAPLEPEGS

SEQ ID NO: 5129 - protein, 95 aa, Thermosynechococcus elongatus
ASVVPQERQQDTRKHYPNYNDIVLNDDFNTFRHVAACLMKYIPNKTSDRAWELTNQVHYEGQAIVWVGPQEQAELYHEQLLRAGLTLAPLEPEGS

SEQ ID NO: 5130 - protein, 95 aa, Thermosynechococcus elongatus
ASVVPQERQQDTRKHYPNYNVIVLNDDFNTYRHVAACLMKYIPNMTSDRAWELTNQVHYEGQAIVWVGPQEQAELYHEQLLRAGLTMAPLEPGGS

SEQ ID NO: 5131 - protein, 95 aa, Thermosynechococcus elongatus
ASVVPQERQQDTRKHYPNYNVIVLNDDFNTFRHVAACLMKYIPNMTSDRAWELTNQVHYEGQAIVWVGPQEQAELYHEQLLRAGLTMAPLEPGGS

SEQ ID NO: 5132 - protein, 95 aa, Thermosynechococcus elongatus
ASVVPQERQQDTRKHYPNYNVIVLNDDFNTFRHVAACLMKYIPNMTSDRAWELTNQVHYKGQAIVWVGPQEQAELYHEQLLRAGLTMAPLEPGGS

SEQ ID NO: 5133 - protein, 95 aa, Thermosynechococcus elongatus
ASVVPQERQQDTRKHYPNYTVIVLNDDFNTFRHVAACLMKYIPNKTSDRAWELTNQVHYEGQAIVWVGPQEQAELYHEQLLRAGLTMAPLEPEGS

SEQ ID NO: 5134 - protein, 95 aa, Thermosynechococcus elongatus
ASVVPQERQQDTRKHYPNYTVIVLNDDFNTFRHVAACLMKYIPNMTSDRAWELTNQVHYEGQAIVWVGPQEQAELYHEQLLRAGLTMAPLEPEGS

SEQ ID NO: 5135 - protein, 95 aa, Thermosynechococcus elongatus; identical to SEQ ID NO: 5134

SEQ ID NO: 5136 - protein, 70 aa, Thermosynechococcus elongatus
ASVVPQERQQDTRKHYPNYTVIVLNDDFNTFRHVAACLMKYIPNMTSDRAWELTNQVLFEGQAIVWVGPL

SEQ ID NO: 5137 - protein, 51 aa, Thermosynechococcus elongatus
ASVVPQERQQDTRKHYPNYTVIVLNDDFNTFRHVAACLMKYIPNMTSDRAW

SEQ ID NO: 5138 - protein, 95 aa, Thermosynechococcus elongatus
ASVVPQERQQDTRKHYPNYTVIVLNDDFITFRHVAACLMKYLPNMTSDRAWELTNQVHYEGHALVWVGPPEPAELYPEQLLRAGLTMAPLEPEGS

SEQ ID NO: 5139 - protein, 95 aa, Thermosynechococcus elongatus
ASVVPQERQQDTRKHYPNYRVIVLNDDFNTFRHVAACLMKYIPNKTSDRAWELTNQVHYEGQAIVWVGPQEQAELYHEQLLRAGLTMAPLEPEGS

SEQ ID NO: 5140 - protein, 95 aa, Thermosynechococcus elongatus
ASVVPQERQQDTRKHYPNYRVIVLNDDFNTFRHVAACLMKYIPNMTSDRAWELTNQVHYEGQAIVWVGPQEQAELYHEQLLRAGLTMAPLEPEGS

SEQ ID NO: 5141 - protein, 95 aa, Thermosynechococcus elongatus
ASVVPQERQQDTRKHYPNYRVIVLNDDFNTFRHVAACLMKYIPNMTSDRAWELTNQVHYEGQAIVWVGPQVQAELYHEQLLRAGLTMAPLEPEGS

SEQ ID NO: 5142 - protein, 95 aa, Thermosynechococcus elongatus
ASVVPQERQQDTRKHYPNYMVSVLNDDFNTFRHGAACLMKYIPNMTSDRAWELTNQVHYEGQAIVWVGPQEQAELYHEQLLRAGLTMAPLEPEGS

SEQ ID NO: 5143 - protein, 95 aa, Thermosynechococcus elongatus
ASVVPQERQQDTRKHYPNYMVIVLNDDFNTFRHVAACLMKYIPNKTSDRAWELTNQVHYEGQAIVWVGPQEQAELYHEQLLRAGLTMAPLEPEGS

SEQ ID NO: 5144 - protein, 95 aa, Thermosynechococcus elongatus; identical to SEQ ID NO: 5143

SEQ ID NO: 5145 - protein, 95 aa, Thermosynechococcus elongatus
ASVVPQERQQDTRKHYPNYEGIVLNDDFNTFRHVAACLMKYIPNMTSDRAWELTNQVHYEGQAIVWVGPQEQAELYHEQLMRAGLTMAPLEPEGS

SEQ ID NO: 5146 - protein, 95 aa, Thermosynechococcus elongatus
ASVVPQERQQDTRKHYPNYEVIVLNDDFNTFQHVVACVKKYIPNMISDRAWELTNQVHYGGRAIVWVGPQEQAELYHEQLLRAGLTMAPLEPEGS

SEQ ID NO: 5147 - protein, 95 aa, Thermosynechococcus elongatus
ASVVPQERQQDTRKHYPNYEVIVLNDDFNTFQHVVACLKKYIPNMISDRAWELTNQVHYGGRAIVWVGPQEQAELYHEQLLRAGLTMAPLEPEGS

SEQ ID NO: 5148 - protein, 95 aa, Thermosynechococcus elongatus
ASVVPQERQQDTRKHYPNYEVIVLNDDFNTFRHVAACLMKYIPNMTSDRAWELTNQVHYEGQAIVWVGPQEQAELYHEQLLRAGLTMAPLEPGGS

SEQ ID NO: 5149 - protein, 19 aa, Thermosynechococcus elongatus
ASVVPQERQQDTRKHYPNY

SEQ ID NO: 5150 - protein, 19 aa, Thermosynechococcus elongatus
ASVVPQERQQDTRKHYPNY

SEQ ID NO: 5151 - protein, 95 aa, Thermosynechococcus elongatus; identical to SEQ ID NO: 2

SEQ ID NO: 5152 - protein, 95 aa, Thermosynechococcus elongatus
ASVVPQERQQDTRKHYPNSKVIVLNDDFNTFRHVAACLMKYIPNMTSDRAWELTNQVHYEGQAIVWVGPQEQAELYHEQLLRAGLTMAPLEPEGS

SEQ ID NO: 5153 - protein, 95 aa, Thermosynechococcus elongatus; identical to SEQ ID NO: 5152

SEQ ID NO: 5154 - protein, 95 aa, Thermosynechococcus elongatus
ASVVPQERQQDTRKHYPNSKVIVLNDDFNTFRHVAACLMKYIPNMTSDRAWELTNQVHYEGQAIVWVGPQEQAELYHEQLLRAGLTMAPLEPGGS

SEQ ID NO: 5155 - protein, 95 aa, Thermosynechococcus elongatus
ASVVPQERQQDTRKHYPNSKVIVLNDDFNTFRHVAACLVKYIPNKTSDRARELTNQVHYEGQAIVWVGPQEQAELYHEQVLRAGLTMAPLEPEGS

SEQ ID NO: 5156 - protein, 95 aa, Thermosynechococcus elongatus
ASVVPQERQQDTRKHYPNCKVIVLNDDFNTFRHVAACLMKYIPNKTSDRAWELTNQVHYEGQAIVWVGPQEQAELYHEQLLRAGLTMAPLEPEGS

SEQ ID NO: 5157 - protein, 95 aa, Thermosynechococcus elongatus; identical to SEQ ID NO: 4

SEQ ID NO: 5158 - protein, 95 aa, Thermosynechococcus elongatus; identical to SEQ ID NO: 2

SEQ ID NO: 5159 - protein, 95 aa, Thermosynechococcus elongatus
ASVVPQERQQDTRKHYPSYKVIVSNDDFNTFRHVAACLMKYIPNMTSDRAWELTNQVHYEGQAIVWVGPQEQAELYHEQLLRAGLTMAPLEPEGS

SEQ ID NO: 5160 - protein, 95 aa, Thermosynechococcus elongatus
ASVVPQERQQDTRKHYPSYKVIVLNDDFNTFRHVAACLMKYIPNMTYDRAWGLTNQVHYEGQAIVWVGPQGQAELYHEQLLRAGLTMAPLEPGGS

SEQ ID NO: 5161 - protein, 95 aa, Thermosynechococcus elongatus
ASVVPQERQQDTRKHYPSYKVIVLNDDFNTFRHVAACLMKYIPDMTSDRAWELTNQVHYKGQAIVWVGPQEQAELNHEQLLRAGLTMAPLEPEGS

SEQ ID NO: 5162 - protein, 95 aa, Thermosynechococcus elongatus
ASVVPQERQQDTRKHYPHYKVIVLNDDFNTFRHDAACLMKYIPNMTSDRAWELTNQVHYEGQAIVWVGPQVQAELYHEQLLRAGLTMAPLEPGGS

SEQ ID NO: 5163 - protein, 95 aa, Thermosynechococcus elongatus
ASVVPQERQQDTRKHYPHYKVIVLNDDFNTFRHVAACLMKYIPNKTSDRAWELTNQVHYEGQAIVWVGPQEQAELYHEQLLRAGLTMAPLEPEGS

SEQ ID NO: 5164 - protein, 95 aa, Thermosynechococcus elongatus
ASVVPQERQQDTRKHYPHYKVIVLNDDFNTFRHVAACLMKYIPNMTSDRAWELTNQVHDEGQAIVWAGPQEQAELSHEQLLRAGLTMAPLEPEGS

SEQ ID NO: 5165 - protein, 95 aa, Thermosynechococcus elongatus
ASVVPQERQQDTRKHYPHYKVIVLNDDFNTFRHVAACLMKYIPNMTSDRAWELTNQVHYEGQAIVWVGPQEQAELYHEQLLRAGLTMAPLEPEGS

SEQ ID NO: 5166 - protein, 95 aa, Thermosynechococcus elongatus
ASVVPQERQQDTRKHYPHYKVIVLNVDFYTFRHVAACLMKYIPNMTSDRAWELTNQVHYEGQAIVWVGPQVQAELYHEQLLRAGLTMAPLEPEGS

SEQ ID NO: 5167 - protein, 95 aa, Thermosynechococcus elongatus
ASVVPQERQQDTRKHYPHYKVIVLSDDFKTFRHVAACLMKYIPNMTSDRAWDLTNHGHYEGQAIVWVGPQVQAELYHEQLLRAGLTMAPLEPGGS

SEQ ID NO: 5168 - protein, 95 aa, Thermosynechococcus elongatus
ASVVPQERQQDTRKHYPDYKVIVLNDDFNTFRHVAACLMKYIPNKTSDRAWELTNQVHYEGQAIVWVGPQEQAELYHEQLLRAGLTMAPLEPEGS

SEQ ID NO: 5169 - protein, 95 aa, Thermosynechococcus elongatus
ASVVPQERQQDTRKHYPDYKVIVLNDDFNTFRHVAACLMKYIPNMTSDRAWELTNQVHYEGQAIVWVGPQEQAELYHEQLLRAGLTMAPLEPEGS

SEQ ID NO: 5170 - protein, 95 aa, Thermosynechococcus elongatus
ASVVPQERQQDTRKHYPNYKVIILNDDFNTFQHVAAWLMKYIPNMTSDRAWELTNQVHYEGQAIVRVGPQEQAELYHKQLLRAGLTMAPLEPEGS

SEQ ID NO: 5171 - protein, 95 aa, Thermosynechococcus elongatus
ASVVPQERQQDTRKHYLNYKVIVLNDDFNTFRHVAACLMKYIPNKTSDRAWELTNQVHYEGQAIVWVGPQEQAELYHEQLLRAGLTMAPLEPEGS

SEQ ID NO: 5172 - protein, 95 aa, Thermosynechococcus elongatus
ASVVPQERQQDTRKHYLNYKVIVLNDDFNTFRHVAACLMKYIPNKTSDRAWELTNQVHYVGQAIVWVGPQERAELYHEQLLRAGLTMAPLEPGGS

SEQ ID NO: 5173 - protein, 95 aa, Thermosynechococcus elongatus
ASVVPQERQQDTRKHYLNYKVIVLNDDFNTFRHVAACLMKYIPNMTSDRAWELTNQVHYEGQAIVWVGPQEQAELYHEQLLRAGLTMAPLEPEGS

SEQ ID NO: 5174 - protein, 95 aa, Thermosynechococcus elongatus
ASVVPQERQQDTRKHYLNYKVIVLNDDFNTFRHVAACLMKYIPNMTSDRAWELTNQVHYEGQAIVWVGPQVQAELYHEQLLRAGLTMAPLEPGGS

SEQ ID NO: 5175 - protein, 95 aa, Thermosynechococcus elongatus
ASVVPQERQQDTRKHYSNYKVIVLNDDFNTFQHVAACLMKYIPNMTSDRAWELTNQVHYEGQAIVWVGPQEQAELYHKQLLRAGLTMAPLEPEGS

SEQ ID NO: 5176 - protein, 95 aa, Thermosynechococcus elongatus
ASVVPQERQQDTRKHYSNYKVIVLNDDFNTFQHVAACLMKYIPNMTSDRAWELTNQVHYKGQAIVWVGPQEQAELYHEQLLRAGLTMAPLEPEGS

SEQ ID NO: 5177 - protein, 95 aa, Thermosynechococcus elongatus
ASVVPQERQQDTRKHYSNYKVIVLNDDFNTFRHVAACLMKYIPNKTSDRAWELTNQVHYEGQAIVWVGPQEQAELYHEQLLRAGLTMAPLEPEGS

SEQ ID NO: 5178 - protein, 95 aa, Thermosynechococcus elongatus
ASVVPQERQQDTRKHYSNYKVIVLNDDFNTFRHVAACLMKYIPNMTSDRAWELTNQVHYEGQAIVWVGPQEQAELYHEQLLRAGLTMAPLEPEGS

SEQ ID NO: 5179 - protein, 95 aa, Thermosynechococcus elongatus
ASVVPQERQQDTRKHSPNYKVIILNDDFNTFQHVAACLMKYIPNMTSDRAWELTNQVHYEGQAIVRVGPQEQAELYHEQLLRTGLTMAPLEPGGS

SEQ ID NO: 5180 - protein, 95 aa, Thermosynechococcus elongatus
ASVVPQERQQDTRKHCPNYKVIVLNDDFNTFRHVAACLMKYIPNMTSDRAWELANQVHYEGQAIVWVGPQEQAELYHEQLLRAGLTMAPLEPGGS

SEQ ID NO: 5181 - protein, 95 aa, Thermosynechococcus elongatus
ASVVPQERQQDTRKHFPNYKVIVLNDDFNTFRHVAACLMKYIPNMTSDRAWELTNQVHYEGQAIVWVGPQEQAELYHEQLLRAGLTMAPLEPEGS

SEQ ID NO: 5182 - protein, 95 aa, Thermosynechococcus elongatus; identical to SEQ ID NO: 18

SEQ ID NO: 5183 - protein, 95 aa, Thermosynechococcus elongatus
ASVVPQERQQDTRKRYPNYKVIVLNDDFNTFRHVAACLKKYIPNMISDRAWELTNQVHYGGRAIVWVGPQEQAELYHEQLLRAGLTMAPLEPEGS

SEQ ID NO: 5184 - protein, 95 aa, Thermosynechococcus elongatus
ASVVPQERQQDTRKRYPNYKVIVLNDDFNTFRHVAACLMKYIPNKTSDRAWELTNQVHYEGQAIVWVGPQEQAELYHEQLLRAGLTMAPLEPEGS

SEQ ID NO: 5185 - protein, 95 aa, Thermosynechococcus elongatus
ASVVPQERQQDTRKRYPNYKVIVLNDDFNTFRHVAACLMKYIPNMTSDRAWELTNQVHYEGQAIVWVGPQVQAELYHEQLLRAGLTMAPLEPGGS

SEQ ID NO: 5186 - protein, 95 aa, Thermosynechococcus elongatus
ASVVPQERQQDTRKLYPNYKVIILNDDFNTFQHVAACLMKYIPNMTSDRAWELTNQVHYEGQAIVWVGPQEQAELYHEQLLRAGLTMAPLEPEGS

SEQ ID NO: 5187 - protein, 95 aa, Thermosynechococcus elongatus
ASVVPQERQQDTRKLYPNYKVIVLNDDFNTFRHVAACLMKYIPNKTSDRAWELTNQVHYEGQAIVWVGPQEQAELYHEQLLRAGLTMAPLEPEGS

SEQ ID NO: 5188 - protein, 95 aa, Thermosynechococcus elongatus
ASVVPQERQQDTRKLYPNYKVIVLNDDFTTFRHVAACLMKYIPNKTSDRAWELTNQVHYEGQAIVWVGPQEQAELYHEQLLRAGLTMAPLEPEGS

SEQ ID NO: 5189 - protein, 95 aa, Thermosynechococcus elongatus
ASVVPQERQQDTRKYYPNYKVIVLNDDFNTFRHVAACLMKYIPNMTSDRAWELTNQVHYVGQAIVWVGPQEQAELYHEQLLRAGLTMAPLEPKGS

SEQ ID NO: 5190 - protein, 95 aa, Thermosynechococcus elongatus
ASVVPQERQQDTRKYYPNYKVIVLNDDFNTFRHVAACLMKYIPNMTSDRSWELTNQVHYEGQAIVWVGPQVQAELYHEQLLRAGLTMAPLEPGGS

SEQ ID NO: 5191 - protein, 15 aa, Thermosynechococcus elongatus
ASVVPQERQQDTRNH

SEQ ID NO: 5192 - protein, 95 aa, Thermosynechococcus elongatus
ASVVPQERQQDTRNHYTNYKVIVLNDDFNTFRHVAACLMKYIPNMTSDRAWELTNHFHYEGQAIVCVGPQEQAELYHEQLLRAGLTMATLEPEGS

SEQ ID NO: 5193 - protein, 95 aa, Thermosynechococcus elongatus
ASVVPQERQQDTRNHYPNYKVIVLNDDFNTFQHVVACLKKYIPNMISDRAWELTNQVHYGGRAIVWVGPQEQAELYHEQLLRAGLTMAPLEPEGS

SEQ ID NO: 5194 - protein, 95 aa, Thermosynechococcus elongatus
ASVVPQERQQDTRNHYPNYKVIVLNDDFNTFRHVAACLMKYIPNKTSDRAWELTNQVHYEGLAIVWVGPQEQAELYHEQLLRAGLPMAPLEPEGS

SEQ ID NO: 5195 - protein, 95 aa, Thermosynechococcus elongatus
ASVVPQERQQDTRNHYPNYKVIVLNDDFNTFRHVAACLMKYIPNMTSDRAWELTNQVHYEGQAIVWVGPQEQAELYHEQLLRAGLTLAPLEPEGS

SEQ ID NO: 5196 - protein, 95 aa, Thermosynechococcus elongatus
ASVVPQERQQDTRNHYPNYKVIVLNDDFNTFRHVAACLMKYIPNMTSDRAWELTNQVHYEGQAIVWVGPQVQAELYHEQLLRAGLTMAPLEPEGS

SEQ ID NO: 5197 - protein, 95 aa, Thermosynechococcus elongatus
ASVVPQERQQDTRNHYPNYKVIVLNDDFNAFRHVAACLMKYIPNKTSDRAWELTNQVHYEGQAIVWVGPQEQAELYHEQLLRAGLTMAPLEPEGS

SEQ ID NO: 5198 - protein, 95 aa, Thermosynechococcus elongatus
ASVVPQERQQDTRTHYPNYKVIVLNDDFNTFRHVAACLMKYIPNMTSDRAWELTNQVHYEGQAIVWVGPQEQAELYHEQLLRAGLTMAPLEPGGS

SEQ ID NO: 5199 - protein, 95 aa, Thermosynechococcus elongatus
ASVVPQERQQDTRTHYPNYKVIVLNDDFNTFRHVAACLMKYIPNMTSDRAWELTNQVHYEGQAIVWVGPQVQAELYHEQLLRAGLTMAPLEPGGS

SEQ ID NO: 5200 - protein, 95 aa, Thermosynechococcus elongatus
ASVVPQERQQDTRTHYANYKVIVLNDDFNTFRHVAACLMKYIPNKTSDRAWELTNQVHYEGQAIVWVGPQEQAELYHEQLLRAGLTMAPLEPEGS

SEQ ID NO: 5201 - protein, 95 aa, Thermosynechococcus elongatus
ASVVPQERQQDTRRHYPNYKVIVLNDDFNTFQHVAACLMKYIPNMTSDRAWELTNQVHYEGQAIVWVGPQEQAELYHEQLLRAGLTMAPLEPEGS

SEQ ID NO: 5202 - protein, 95 aa, Thermosynechococcus elongatus
ASVVPQERQQDTRRHYPNYKVIVLNDDFNTFRHVAACLMKYIPNKTSDRAWELTNQVHYGGRAIVWVGPQEQAELYHEQLLRAGLTMAPLEPEGS

SEQ ID NO: 5203 - protein, 95 aa, Thermosynechococcus elongatus
ASVVPQERQQDTRMHYPNYKVIVLNDDFNTFQHVVACLKKYIPNMISDRAWELTNQVHYGGRAIVWVGPQEQAELYHEQLLRAGLTMAPLEPEGS

SEQ ID NO: 5204 - protein, 95 aa, Thermosynechococcus elongatus
ASVVPQERQQDTRMHYPNYKVIVLNDDFNTFRHVAACLMKYIPNKTSDRAWELTNQVHYEGQAIVWVGPQEQAELYHEQLLRAGLTMAPLEPEGS

SEQ ID NO: 5205 - protein, 40 aa, Thermosynechococcus elongatus
ASVVPQERQQDTRMHYPNYKVIVLNDDFNTFRHFAACLMK

SEQ ID NO: 5206 - protein, 95 aa, Thermosynechococcus elongatus
ASVVPQERQQDTRMHYPNYMVIVLNDDFNTFRHVAECLMKYIPNMTSDRAWEFTNQFHYEGQAIVWVGPQEQAELYHEQLLRAGLTMAPLEPEGS

SEQ ID NO: 5207 - protein, 95 aa, Thermosynechococcus elongatus
ASVVPQERQQDTRQHYPNYKGIVLNDDFNTFRHVAACLMKYIPNMTSDRAWELTNQVHYEGQAIVWVGPQEQAELYHEHLLRAGLTMAPLEPEGS

SEQ ID NO: 5208 - protein, 52 aa, Thermosynechococcus elongatus
ASVVPQERQQDTRQHYPNYKVIVLNDDFNTFRHVAACLMKYIPNMTSDRAWE

SEQ ID NO: 5209 - protein, 95 aa, Thermosynechococcus elongatus
ASVVPQERQQDTRQHYPNYKVLVLNDDFNTFRHVAACLMKYIPNKTSDRAWELTNQVHYEGQAIVWVGPQEQAELYHEQLLRAGLTMAPLEPEGS

SEQ ID NO: 5210 - protein, 13 aa, Thermosynechococcus elongatus
ASVVPQERQQDTR

SEQ ID NO: 5211 - protein, 13 aa, Thermosynechococcus elongatus
ASVVPQERQQDTR

SEQ ID NO: 5212 - protein, 13 aa, Thermosynechococcus elongatus
ASVVPQERQQDTR

SEQ ID NO: 5213 - protein, 95 aa, Thermosynechococcus elongatus; identical to SEQ ID NO: 2

SEQ ID NO: 5214 - protein, 40 aa, Thermosynechococcus elongatus
ASVVPQERQQDTSKQYPNYKVIVLNDYFNTFRHFDACLMK

SEQ ID NO: 5215 - protein, 95 aa, Thermosynechococcus elongatus
ASVVPQERQQDTSKHYPNYKVIVLNDDFNTFQHVVACLKKYIPNMISDRAWELTNQVHYGGRAIVCVGPQAQAELYHEQLLRAGLTMAPLEPEGS

SEQ ID NO: 5216 - protein, 95 aa, Thermosynechococcus elongatus
ASVVPQERQQDTSKHYPNYKVIVLNDDFNTFRHVAACLMKYIPNKTSDRAWELTNQVHYEGQAIVWVGPQEQAELYHEQLLRAGLTIAPLEPEGS

SEQ ID NO: 5217 - protein, 95 aa, Thermosynechococcus elongatus
ASVVPQERQQDTSKHYPNYKVIVLNDDFNTFRHVAACLMKYIPNMTSDRAWELTNQVHYKGQAIVWVGPQEQAELNHEQLLRAGLTMAPLEPEGS

SEQ ID NO: 5218 - protein, 95 aa, Thermosynechococcus elongatus; identical to SEQ ID NO: 586

SEQ ID NO: 5219 - protein, 95 aa, Thermosynechococcus elongatus
ASVVPQERQQDTSKHYPNYKVIVLNDDFNTFRHVAACLMKYIPNMTSDRAWELTNQVHYGGRAIVWVGPQEQAELYHEQLLRAGLTMAPLEPEGS

SEQ ID NO: 5220 - protein, 95 aa, Thermosynechococcus elongatus
ASVVPQERQQDTIKHYPNYKVIVLNDDFNTFQHVVACLKKYIPNMISDRAWELTNQVHYGGRAIVWVGPQEQAELYHEQLLRAGLTMAPLEPEGS

SEQ ID NO: 5221 - protein, 93 aa, Thermosynechococcus elongatus
ASVVPQERQQDTIKHYPNYKVIVLNDDFNTFRHVAACLMKYIPNMTSDRAWELTNQVHYEGQAIVWVGPQEQAELYHEQLLRAGLTMAPFEPE

SEQ ID NO: 5222 - protein, 95 aa, Thermosynechococcus elongatus
ASVVPQERQQDTIKHYPNYKVIVLNDDFNTFRHVAACLMKYIPNMTSDRAWELTNQVHYEGQAIVWVGPQEQAELYHEHMLRAGLTIAPLEPEGS

SEQ ID NO: 5223 - protein, 95 aa, Thermosynechococcus elongatus
ASVVPQERQQDTRKHYTNYKVIVLNDDFNTFRHVAACLMKYIPNMTSDRAWELTNQVHYEGQAIVWVGPQVQAELYHEQLLRAGLTMAPLEPGGS

SEQ ID NO: 5224 - protein, 95 aa, Thermosynechococcus elongatus; identical to SEQ ID NO: 4

SEQ ID NO: 5225 - protein, 95 aa, Thermosynechococcus elongatus
ASVVPQERQQDTRKHYPNYKVIILNDDFNTFQHVAACLMKYIPNMTSDRAWELTNQVHYEGQAIVRVGPQEQAELYHTQLLRAGLTMAPLEPEGS

SEQ ID NO: 5226 - protein, 95 aa, Thermosynechococcus elongatus; identical to SEQ ID NO: 3797

SEQ ID NO: 5227 - protein, 95 aa, Thermosynechococcus elongatus
ASVVPQERQQDTRKHYPNYKVIVLNDDFNTFRHVAACWMKSIPHMTSDRAGELTNQGHYEGQALVWVGPQEPAEFYHEQLLRAGLTRAPLEPGGS

SEQ ID NO: 5228 - protein, 95 aa, Thermosynechococcus elongatus; identical to SEQ ID NO: 700

SEQ ID NO: 5229 - protein, 95 aa, Thermosynechococcus elongatus; identical to SEQ ID NO: 31

SEQ ID NO: 5230 - protein, 95 aa, Thermosynechococcus elongatus
ASVVPQERQQDTRKHYPNYKVIVLNDDFNTFRHVAACLMKYIPNMTSDRAWDLTNQGHYKGQAIVWVGPQDHAELYHEQLLRAGLTMAPLEPEGS

SEQ ID NO: 5231 - protein, 95 aa, Thermosynechococcus elongatus; identical to SEQ ID NO: 7

SEQ ID NO: 5232 - protein, 95 aa, Thermosynechococcus elongatus; identical to SEQ ID NO: 16

SEQ ID NO: 5233 - protein, 95 aa, Thermosynechococcus elongatus; identical to SEQ ID NO: 754

SEQ ID NO: 5234 - protein, 95 aa, Thermosynechococcus elongatus
ASVVPQERQQDTGKHYPNYKVIVLNDDFNTFQHVVACLKKYIPNMISDRAWELTNQVHYGGRAIVWVGPQEQAELYHEQLLRAGLTMAPLEPEGS

SEQ ID NO: 5235 - protein, 95 aa, Thermosynechococcus elongatus; identical to SEQ ID NO: 1039

SEQ ID NO: 5236 - protein, 95 aa, Thermosynechococcus elongatus
ASVVPQERQQDTGKHYPNYKVIVLNDDFNTFRHVAACLMKYIPNMTSDRAWELTNQVHYEGQAIVWVGPQEQAELYHEQLLRAGLTMAPLEPEGS

SEQ ID NO: 5237 - protein, 95 aa, Thermosynechococcus elongatus
ASVVPQERQQDPRKHYPNYKVIILNDDFNTFQHVAACLKKYIPNMISDRAWELTNQVHYGGRAIVWVGPQEQAELYHEQLLRAGLTMAPLEPEGS

SEQ ID NO: 5238 - protein, 95 aa, Thermosynechococcus elongatus
ASVVPQERQQDPRKHYPNYKVIILNDDFNTFQHVAACLMKYIPNMTSDRAWELTNQVHYEGQAIVRVGPQEQAELYHKQLLRAGLTMAPLEPEGS

SEQ ID NO: 5239 - protein, 95 aa, Thermosynechococcus elongatus
ASVVPQERQQDPRKHYPNYKVIVLNDDFNTYRHVAACLMKYIPNMTSDRAWELTNQVHYVGLAIVWVGPQEQAELYHEQLLRAGLTRAPLEPEGS

SEQ ID NO: 5240 - protein, 95 aa, Thermosynechococcus elongatus
ASVVPQERQQDPRKHYPNYKVIVLNDDFNTFRHVAACLKKYIPNMISDRAWELTNQVHYGGRAIVWVGPQEQAELYHEQLLRAGLTMTPLEPEGS

SEQ ID NO: 5241 - protein, 95 aa, Thermosynechococcus elongatus
ASVVPQERQQDPRKHYPNYKVIVLNDDFNTFRHVAACLMKYIPNKTSDRAWELTNQVHYEGQAIVWVGPQEQAEFYHEQLLRAGLTMAPLEPEGS

SEQ ID NO: 5242 - protein, 95 aa, Thermosynechococcus elongatus; identical to SEQ ID NO: 351

SEQ ID NO: 5243 - protein, 95 aa, Thermosynechococcus elongatus
ASVVPQERQQDPRKHYPNYKVIVLNDDFNTFRHVAAWLMKYIPNKTSDRAWELTNQVHYEGQAIVWVGPQEQAELYHEQLLRAGLTMAPLEPEGS

SEQ ID NO: 5244 - protein, 75 aa, Thermosynechococcus elongatus
ASVVPQERQQDPRKHYPNYKVLVLNDDFNTFRHVAPCLMKYIPNKTSDRAWDLTNQVLYEGQAIVWVGPQEHAEL

SEQ ID NO: 5245 - protein, 95 aa, Thermosynechococcus elongatus; identical to SEQ ID NO: 351

SEQ ID NO: 5246 - protein, 95 aa, Thermosynechococcus elongatus
ASVVPQERQQDARKHYPNYKVIVLNDDFNTFQHVVACLKKYIPNMISDRAWELTNQVHYGGRAIVWVGPQEQAELYHEQLLRAGLTMAPLEPEGS

SEQ ID NO: 5247 - protein, 95 aa, Thermosynechococcus elongatus
ASVVPQERQQDARKHYPNYKVIVLNDDFNTFRHVAACLMKYIPNMTSDRAWELTNQVHYEGQAIVWVGPQEQAELYHEQLLRAGLTMAPLEPEGS

SEQ ID NO: 5248 - protein, 95 aa, Thermosynechococcus elongatus
ASVVPQERQQGTRKHYPNDKVIVLNDDFNTFRDVAACLMKYIPNMTSDRAWELTNQVHYTGQAIVWVGPQEQAELNHEQLLRAGLTMAPLEPEGS

SEQ ID NO: 5249 - protein, 95 aa, Thermosynechococcus elongatus
ASVVPQERQQGTRKHYPNYKGIVLNDDFNTFRHVAACLMKFIPNMTSDRAWELTNQVHYEGQAIVWVGPQEQAELYHEQLLRAGLTMAPLEPEGS

SEQ ID NO: 5250 - protein, 95 aa, Thermosynechococcus elongatus
ASVVPQERQQGTRKHYPNYKGIVLNDDFNTFRHVAACLMKYIPNMTSDRAWELTNQVHYKGQAIVWVGPQEQAELNHEQLLRAGLTMAPLEPEGS

SEQ ID NO: 5251 - protein, 95 aa, Thermosynechococcus elongatus
ASVVPQERQQGTRKHYPNYKVIVLNDDFNTFRHVAACLMKYIPNKTSDRAWELTNQVHYEGQAIVWVGPQEQAELYHEQLLRAGLTMAPLEPEGS

SEQ ID NO: 5252 - protein, 95 aa, Thermosynechococcus elongatus
ASVVPQERQQGTRKHYPNYKVIVLNDDFNTFRHVAACLMKYIPNMTSDRAWELTNQVHYEGQAIVWVGPQEQAELYHEQLLRAGLTMAPLEPEGS

SEQ ID NO: 5253 - protein, 95 aa, Thermosynechococcus elongatus; identical to SEQ ID NO: 5252

SEQ ID NO: 5254 - protein, 95 aa, Thermosynechococcus elongatus
ASVVPQERQQVTRKNYPNYKVIVLNDDFNTFRHVAACLMKYIPNMTSDRAWELTNQVHYEGQAIVWVGPQVQAELYHEQLLRAGLTMAPLEPGGS

SEQ ID NO: 5255 - protein, 15 aa, Thermosynechococcus elongatus
ASVVPQERQQVTRKH

SEQ ID NO: 5256 - protein, 52 aa, Thermosynechococcus elongatus
ASVVPQERQQVTRKHYPNYKDIVLNDDYNTIRHVAACLMKYIPNMTSDRAWE

SEQ ID NO: 5257 - protein, 95 aa, Thermosynechococcus elongatus
ASVVPQERQQVTRKHYPNYKVIVLNDDFNTFRHDAACLMKYIPNITSDRAWELTNQVHYEGQAIVWVGPQEQAELYHEQLLRAGLTMAPLEPEGS

SEQ ID NO: 5258 - protein, 95 aa, Thermosynechococcus elongatus
ASVVPQERQQVTRNHHPNDKVIVLNDDFNTFRHVAACLMKYIPNMTSDRAWELTNQVHYEGQAIVWVGPPEQAELYHEHLLRDGLTMAPLEPEGS

SEQ ID NO: 5259 - protein, 15 aa, Thermosynechococcus elongatus
ASVVPQERQQVARKH

SEQ ID NO: 5260 - protein, 95 aa, Thermosynechococcus elongatus; identical to SEQ ID NO: 36

SEQ ID NO: 5261 - protein, 95 aa, Thermosynechococcus elongatus
ASVVPQERQQVTRKHYPNYKVIVLNDDFNTFRHVAACLMKYIPNMTSDRAWELTNQVHYGGRALVWVGPQEQAELYHEQLLRAGLTMAPLEPEGS

SEQ ID NO: 5262 - protein, 95 aa, Thermosynechococcus elongatus
ASVVPQERQQVNRKHYPNYKVIVLNDDFNTFRHVAACLMKYIPNKTSDRAWELTNQVHYEGQAIVWVGPQEQAELYHEQLLRAGLTMAPLEPEGS

SEQ ID NO: 5263 - protein, 95 aa, Thermosynechococcus elongatus
ASVVPQERQQVNRKHHPNYKVIVLNDDFNTFRHVAACLMKYIPNMTSDRAWELTNQVHYEGQAIVWVGPQEQAELYHEQLLRAGLTMAPLEPEGS

SEQ ID NO: 5264 - protein, 95 aa, Thermosynechococcus elongatus
ASVVPQERQQVNRKHHPNYKVIVLNDDFNTFQHVVACLKKYIPNMISDRAWELTNQVHYGGRAIVWVGPQEQAELNHEQLLRAGLTMAPLEPEGS

SEQ ID NO: 5265 - protein, 95 aa, Thermosynechococcus elongatus
ASVVPQERQQVNRKHYPNYKVIVLNDDFNTFRHVAACLMKYIPNMTSDRAWELTNQVHYKGQAIVWVGPQEQAELNHEQLLRAGLTMAPLEPEGS

SEQ ID NO: 5266 - protein, 95 aa, Thermosynechococcus elongatus
ASVVPQERQQVTRKHKPNYKVIVLNDDFNTFRHVAACLMKYIPNMTSDRAWELTNQVHYKGQAIVWVGPQEQAELNHEQLLRAGLTMAPLEPEGS

SEQ ID NO: 5267 - protein, 95 aa, Thermosynechococcus elongatus
ASVVPQERQQVTRKHYPNYKDIVLNDDFNTIRHVAACLMKYIPNKTSDRARELTNQVHYEGLAIVWVGPQVQAELFHEQLLRAGLTLAPLEPEGS

SEQ ID NO: 5268 - protein, 95 aa, Thermosynechococcus elongatus
ASVVPQERQQVTKKHYPNYKVIVLNDDFNTFRHVAACLMKYIPNMTSDRAWELTNQVHYKGQAIVWVGPQEQAELNHEQLLRAGLTMAPLEPEGS

SEQ ID NO: 5269 - protein, 95 aa, Thermosynechococcus elongatus
ASVVPQERQQVTRKHYPNYKLIVLNDDFNTFRHVAACLMKYIPNKTSDRAWELTNQVHYVGQAIVWVGPQERAELYHEQLLRAGLTMAPLEPEGS

SEQ ID NO: 5270 - protein, 95 aa, Thermosynechococcus elongatus; identical to SEQ ID NO: 33

SEQ ID NO: 5271 - protein, 95 aa, Thermosynechococcus elongatus; identical to SEQ ID NO: 34

SEQ ID NO: 5272 - protein, 95 aa, Thermosynechococcus elongatus
ASVVPQERQQVTRKHYPNYKVIILNDDFNTFQHVAACLMKYIPNMTSDRAWELTNQVHYEGQAIVRVGPQEQTELYHKQLLRAGLTMAPLEPGGS

SEQ ID NO: 5273 - protein, 52 aa, Thermosynechococcus elongatus
ASVVPQERQQVTRKHYPNYKVIVLNDDYNTFRHFAACLMKYIPNKTSDRAWE

SEQ ID NO: 5274 - protein, 58 aa, Thermosynechococcus elongatus
ASVVPQERQQVTRKHYPNYKVIVMNDDFNTFRHDAACLMKYIPNKTSDRAWELTNEVH

SEQ ID NO: 5275 - protein, 95 aa, Thermosynechococcus elongatus
ASVVPQERQQVTRKHYPNYKVIVLNDDFNTFQHVAACLMKYIPNMTSDRAWELTNQVHYEGQAIVRVGPQEQAELYHEQLLRAGLTMAPLEPEGS

SEQ ID NO: 5276 - protein, 95 aa, Thermosynechococcus elongatus; identical to SEQ ID NO: 417

SEQ ID NO: 5277 - protein, 95 aa, Thermosynechococcus elongatus; identical to SEQ ID NO: 168

SEQ ID NO: 5278 - protein, 95 aa, Thermosynechococcus elongatus
ASVVPQERQQVTRKHYPNYKVIVLNDDFNTFQHVVACLKKYIPNMISDRAWELTNQVHYGGRAIVWVGPQEQAELYHEQLVRAGLTMAPLEPEGS

SEQ ID NO: 5279 - protein, 95 aa, Thermosynechococcus elongatus
ASVVPQERQQVTRKHYPNYKVIVLNDDFNTFQHVVACLKKYIPNMISDRAWELTNQVHYGGRAIVWVGPQEQAELYHEQLLRAGLTMAPLETEGS

SEQ ID NO: 5280 - protein, 37 aa, Thermosynechococcus elongatus
ASVVPQERQQVTRKHYPNYKVIVLNDDFNTFRHVAAC

SEQ ID NO: 5281 - protein, 95 aa, Thermosynechococcus elongatus
ASVVPQERQQVTRKHYPNYKVIVLNDDFNTFRHVAACFMKYIPNKTSDRAWELTNQVHYVGQAIVWVGPQERAELYHEQLLRAGLTMAPLEPEGS

SEQ ID NO: 5282 - protein, 95 aa, Thermosynechococcus elongatus; identical to SEQ ID NO: 1712

SEQ ID NO: 5283 - protein, 95 aa, Thermosynechococcus elongatus; identical to SEQ ID NO: 78

SEQ ID NO: 5284 - protein, 95 aa, Thermosynechococcus elongatus
ASVVPQERQQVTRKHYPNYKVIVLNDDFNTFRHVAACLMKYIPNKTSDRAWQLTNQVHYGGRAIVWVGPQEQAELYHEQLLRAGLTMAPLEPEGS

SEQ ID NO: 5285 - protein, 95 aa, Thermosynechococcus elongatus
ASVVPQERQQVTRKHYPNYKVIVLNDDFNTFRHVAACLMKYIPNKTSDRAWELTNQVHHVGQAIVWVGPQERAELYHEQLLRAGLTMAPLEPEGS

SEQ ID NO: 5286 - protein, 95 aa, Thermosynechococcus elongatus; identical to SEQ ID NO: 1718

SEQ ID NO: 5287 - protein, 95 aa, Thermosynechococcus elongatus
ASVVPQERQQVTRKHYPNYKVIVLNDDFNTFRHVAACLMKYIPNKTSDRAWELTNQVHYEGQAIVWVGPQVQAELYHEQLVRAGLTMAPLEPGGS

SEQ ID NO: 5288 - protein, 95 aa, Thermosynechococcus elongatus
ASVVPQERQQVTRKHYPNYKVIVLNDDFNTFRHVAACLMKYIPNKTSDRAWELTNQVHYECQAIVWVGPQEQAELYHEQLLRAGLTMAPLEPEGS

SEQ ID NO: 5289 - protein, 95 aa, Thermosynechococcus elongatus
ASVVPQERQQVTRKHYPNYKVIVLNDDFNTFRHVAACLMKYIPNKTSDRAWELTNQVHYVGQAIVWVGPQERTELYHEQLLRAGLTMAPLEPGGS

SEQ ID NO: 5290 - protein, 95 aa, Thermosynechococcus elongatus
ASVVPQERQQVTRKHYPNYKVIVLNDDFNTFRHVAACLMKYIPNKTSDRAWELTNQVHYVGQAIVWVGPQERAELYHEQVLRAGLTMAPLEPEGS

SEQ ID NO: 5291 - protein, 95 aa, Thermosynechococcus elongatus
ASVVPQERQQVTRKHYPNYKVIVLNDDFNTFRHVAACLMKYIPNKTSDRAWELTNQVHYVGQAIVWVGPQERAELYHEQLLRAGLTMSPLEPEGS

SEQ ID NO: 5292 - protein, 95 aa, Thermosynechococcus elongatus
ASVVPQERQQVTRKHYPNYKVIVLNDDFNTFRHVAACLMKYIPNKTSDRAWELTNQVHYVGQAIVWVGPQERAELYHEQLLRAGLTIAPLEPEGS

SEQ ID NO: 5293 - protein, 95 aa, Thermosynechococcus elongatus; identical to SEQ ID NO: 33

SEQ ID NO: 5294 - protein, 95 aa, Thermosynechococcus elongatus
ASVVPQERQQVTRKHYPNYKVIVLNDDFNTFRHVAACLMKYIPNKTSDRAWELTNQVHYVGQAIVWVGPQELAELYHEQLLRAGLTMAPLEPEGS

SEQ ID NO: 5295 - protein, 77 aa, Thermosynechococcus elongatus
ASVVPQERQQVTRKHYPNYKVIVLNDDFNTFRHVAACLMKYIPNKTSDRAWELTNQVHYVGQAIVWVGPQELAELYH

SEQ ID NO: 5296 - protein, 95 aa, Thermosynechococcus elongatus
ASVVPQERQQVTRKHYPNYKVIVLNDDFNTFRHVAACLMKYIPNKTSDRAWELTNQVHYVGQAIVCVGPQERAELYHEQLLRAGLTMAQLEPEGS

SEQ ID NO: 5297 - protein, 95 aa, Thermosynechococcus elongatus
ASVVPQERQQVTRKHYPNYKVIVLNDDFNTFRHVAACLMKYIPNKTSDRAWELTNQVHYVGPAIVWVGPQERADLYHEHLLRAGLTMAPLEPEGS

SEQ ID NO: 5298 - protein, 95 aa, Thermosynechococcus elongatus
ASVVPQERQQVTRKHYPNYKVIVLNDDFNTFRHVAACLMKYIPNKTSDRAWELTNQVHYVGLAIVWVGPQERAELYHEQLLRAGLTMAPLEPEGS

SEQ ID NO: 5299 - protein, 95 aa, Thermosynechococcus elongatus
ASVVPQERQQVTRKHYPNYKVIVLNDDFNTFRHVAACLMKYIPNKTSDRAWELTNQVHYVVQAIVWVGPQERAELYHEQLLRAGLTMAPLEPEGS

SEQ ID NO: 5300 - protein, 95 aa, Thermosynechococcus elongatus
ASVVPQERQQVTRKHYPNYKVIVLNDDFNTFRHVAACLMKYIPNKTSDRAWELTNQFHYEGQAIVWVGPQEQAELYHEQLLRAGLTMAPLEPEGS

SEQ ID NO: 5301 - protein, 95 aa, Thermosynechococcus elongatus
ASVVPQERQQVTRKHYPNYKVIVLNDDFNTFRHVAACLMKYIPNKTSDRAWELTNRVHYVGQAIVWVGPQERAELYHEQLLRAGLTMAPLEPEGS

SEQ ID NO: 5302 - protein, 95 aa, Thermosynechococcus elongatus
ASVVPQERQQVTRKHYPNYKVIVLNDDFNTFRHVAACLMKYIPNKTSDRAWDLTNQVHYVGQAIVWVGPQERAELYHEQLLRAGLTMAPLEPEGS

SEQ ID NO: 5303 - protein, 95 aa, Thermosynechococcus elongatus
ASVVPQERQQVTRKHYPNYKVIVLNDDFNTFRHVAACLMKYIPNKTFDRAWELTNQVHYVGQAIVWVGPQERAELYHEQLLRAGLTMAPLEPEGS

SEQ ID NO: 5304 - protein, 95 aa, Thermosynechococcus elongatus; identical to SEQ ID NO: 5

SEQ ID NO: 5305 - protein, 95 aa, Thermosynechococcus elongatus; identical to SEQ ID NO: 15

SEQ ID NO: 5306 - protein, 95 aa, Thermosynechococcus elongatus
ASVVPQERQQVTRKHYPNYKVIVLNDDFNTFRHVAACLMKYIPNMTSDRAWELTNQVHYEGQAIVWVGPQEQAELYHEQLLRAGLTIAPLEPEGS

SEQ ID NO: 5307 - protein, 95 aa, Thermosynechococcus elongatus; identical to SEQ ID NO: 105

SEQ ID NO: 5308 - protein, 95 aa, Thermosynechococcus elongatus
ASVVPQERQQVTRKHYPNYKVIVLNDDFNTFRHVAACLMKYIPNMTSDRAWELTNQVHYEGQAIVWVGPQEQAELYHEQLLRAGLTLAPLEPEGS

SEQ ID NO: 5309 - protein, 95 aa, Thermosynechococcus elongatus; identical to SEQ ID NO: 5

SEQ ID NO: 5310 - protein, 58 aa, Thermosynechococcus elongatus
ASVVPQERQQVTRKHYPNYKVIVLNDDFNTFRHVAACLMKYIRNKTSDRAWELTNHVL

SEQ ID NO: 5311 - protein, 95 aa, Thermosynechococcus elongatus; identical to SEQ ID NO: 33

SEQ ID NO: 5312 - protein, 95 aa, Thermosynechococcus elongatus
ASVVPQERQQVTRKHYPNYKVIVLNDDFNTFRHVAAFLMKYIPNKTSDRAWELTNQVHYVGQAIVWVGPQERAELYHEQLLRAGLTMAPLEPEGS

SEQ ID NO: 5313 - protein, 65 aa, Thermosynechococcus elongatus
ASVVPQERQQVTRKHYPNYKVIVLNDDFNTFRHVAACLMKYIPNKTSDRAWELTNQVHYVGQAIV

SEQ ID NO: 5314 - protein, 95 aa, Thermosynechococcus elongatus
ASVVPQERQQVTRKHYPNYKVIVLNDDFNTFRHVVACLKKYIPNMISDRAWELTNQVHYGGRAIVWVGPQEQAELYHEQLLRAGLTRAPLEPEGS

SEQ ID NO: 5315 - protein, 95 aa, Thermosynechococcus elongatus; identical to SEQ ID NO: 162

SEQ ID NO: 5316 - protein, 95 aa, Thermosynechococcus elongatus; identical to SEQ ID NO: 1088

SEQ ID NO: 5317 - protein, 95 aa, Thermosynechococcus elongatus; identical to SEQ ID NO: 34

SEQ ID NO: 5318 - protein, 95 aa, Thermosynechococcus elongatus
ASVVPQERQQVTRKHYPNYKVMVLNDDFNTFRHVAACLMKYIPNKTSDRAWELTNQVHYVGQAIVWVGPQERAELYHEQLLRAGLTMAPLEPEGS

SEQ ID NO: 5319 - protein, 95 aa, Thermosynechococcus elongatus
ASVVPQERQQVTRKHYPNYNVIVLNDDFNTFRHVAACLMKYIPNKTSDRAWELTNQVHYVGQAIVWVGPQERAELYHEQLLRAGLTMAPLEPEGS

SEQ ID NO: 5320 - protein, 95 aa, Thermosynechococcus elongatus
ASVVPQERQQVTRKHYPNYTVIVLNDDFNTFRHVAACLMKYIPNMTSDRAWELTNQVHYEGQAIVWVGPQEQAELYHEQLLRAGLTMAPLEPEGS

SEQ ID NO: 5321 - protein, 95 aa, Thermosynechococcus elongatus
ASVVPQERQQVTRNHYPNYKVIVLNDDFNTFRHVAACLMKYIPNMTSDRAWELTNQVHYKGQAIVWVGPQEQAELNHEQLLRAGLTMAPLEPEGS

SEQ ID NO: 5322 - protein, 95 aa, Thermosynechococcus elongatus
ASVVPQERQQVTRKNYPNYKVIVLNDDFNTFQHVVACLKKYIPNMISDRAWELTNQVHYGGRAIVWVGPQEQAELYHEQLLRAGLTMAPLEPEGS

SEQ ID NO: 5323 - protein, 36 aa, Thermosynechococcus elongatus
ASVVPQERQQVTRKQYPNYKVIVLNDDFNTFQHVDA

SEQ ID NO: 5324 - protein, 95 aa, Thermosynechococcus elongatus
ASVVPQERQQVTRKQYPNYKVIVLNDDFNTFRHVAACLMKYIPNMTSDRAWELTNQVHYKGQAIVWVGPQEQAELNHEQLLRAGLTMAPLEPEGS

SEQ ID NO: 5325 - protein, 40 aa, Thermosynechococcus elongatus
ASVVPQERQQVTRKHNPNYKVIDLNDDFNTFRHVAASLMK

SEQ ID NO: 5326 - protein, 23 aa, Thermosynechococcus elongatus
ASVVPQERQQVTRKHNPNYKVIV

SEQ ID NO: 5327 - protein, 95 aa, Thermosynechococcus elongatus
ASVVPQERQQVTRKHNPNYKVIVLNDDFNTFRHVAACLMKYIPNKTSDRAWELTNQVHYEGQAIVWVGPQEQAELYHEQLLRAGLTMAPLEPEGS

SEQ ID NO: 5328 - protein, 95 aa, Thermosynechococcus elongatus
ASVVPQERQQVTRKHNPNYKVIVLNDDFNTFRHVAACLMKYIPNMTSDRAWELTNQVHYKGQAIVWVGPQEQAELNHEQLLRAGLTMAPLEPEGS

SEQ ID NO: 5329 - protein, 95 aa, Thermosynechococcus elongatus
ASVVPQERQQVTRKHQPKYKFIVFKEEFNTLRHVSACLMKYIPNMTSDRAWELTNQVHYKGQAIVWVGPQEQAELNHEQLLRAGLTMAPLEPEGS

SEQ ID NO: 5330 - protein, 95 aa, Thermosynechococcus elongatus
ASVVPQERQQVTRKHHPNNKVIVLNDDFNTFRHVAACLMKYIPNMTSDRAWELTNQVHYEGQAIVWVGPQEQAELYHEQLLRAGLTMAPLEPEGS

SEQ ID NO: 5331 - protein, 95 aa, Thermosynechococcus elongatus
ASVVPQERQQVTRKHHPNHKVIVLNDDFNTFRHVAACLMKYIPNMTSDRAWELTNQVHYEGQAIVWVGPQEQAELYHEQLLRAGLTMAPLEPEGS

SEQ ID NO: 5332 - protein, 95 aa, Thermosynechococcus elongatus
ASVVPQERQQVTRKHHPNYKDIVLNDDFNTFRHVAACLMKYIPNMTSDRAWELTNQVHYEGQAIVWVGPQEQAELYHEQLLRAGLTMAPLEPEGS

SEQ ID NO: 5333 - protein, 95 aa, Thermosynechococcus elongatus
ASVVPQERQQVTRKHHPNYKDIVLNDDFNTFRHVAACLMKYIPNMTSDRAWELTNQVHYEGLAIVWVCPQEQAELYHELWLRAGLTMAPLEPVGS

SEQ ID NO: 5334 - protein, 58 aa, Thermosynechococcus elongatus
ASVVPQERQQVTRKHHPNYKDIVLNDDFNTFRHFAACLMKYIPNMTSDRAWELTNKVH

SEQ ID NO: 5335 - protein, 77 aa, Thermosynechococcus elongatus
ASVVPQERQQVTRKHHPNYKDIVLNDDFNTFLHVAASLMKYIPNMTSDRAWELTNQVQYEGQAIVWVGPQELAVLYH

SEQ ID NO: 5336 - protein, 95 aa, Thermosynechococcus elongatus
ASVVPQERQQVTRKHHPNYKAIVLNDDFNTFRHVAACLMKYIPNMTSDRAWELTNQVHYGGRAIVWVGPQEQAELYHEQLLRAGLTMAPLEPEGS

SEQ ID NO: 5337 - protein, 95 aa, Thermosynechococcus elongatus
ASVVPQERQQVTRKHHPNYKVRVLNDDFNTFRHVAACLMKYIPNMTSDRAWELTNQVHYKGQAIVWVGPQEQAELNHEQLLRAGLTMAPLEPEGS

SEQ ID NO: 5338 - protein, 95 aa, Thermosynechococcus elongatus; identical to SEQ ID NO: 10

SEQ ID NO: 5339 - protein, 77 aa, Thermosynechococcus elongatus
ASVVPQERQQVTRKHHPNYKVIVLNDDFNTFRHVAACLMKYIPNMTSDRAWELTNQVHYKCLSIVWVGPQEQAELNH

SEQ ID NO: 5340 - protein, 95 aa, Thermosynechococcus elongatus; identical to SEQ ID NO: 296

SEQ ID NO: 5341 - protein, 95 aa, Thermosynechococcus elongatus
ASVVPQERQQVTRKHHPNYKVIVMNDDFNTFRHVAPCLMKYIPIMTSDRAWELTNQVLYVGLAIVLVGPQVQAVLFHVYLLRAGLTLAPLEPGGS

SEQ ID NO: 5342 - protein, 95 aa, Thermosynechococcus elongatus
ASVVPQERQQVTRKHHPNYKVIVSNDDFNTFRHVAACLMKYIPNMTSDRAWELTNQVHYEGQAIVWVGPQVQAELYHEQLLRAGLTMAPLEPGGS

SEQ ID NO: 5343 - protein, 95 aa, Thermosynechococcus elongatus
ASVVPQERQQVTRKHHPNYKVIVLNDDFKTFRHVAACLMKYIPNMTSDRAWELTNQVHYEGQAIVWVGPQEQAELYHEQLLRAGLTMAPLEPEGS

SEQ ID NO: 5344 - protein, 95 aa, Thermosynechococcus elongatus
ASVVPQERQQVTRKHHPNYKVIVLNDDFNTIRHVAACLMKYIPNMTSDRAWELTNQVHYEGQAIVWVGPQEQAELYHEHLLRAGLTWAPLEPEGS

SEQ ID NO: 5345 - protein, 95 aa, Thermosynechococcus elongatus
ASVVPQERQQVTRKHHPNYKVIVLNDDFNTLRHVAACLMKYIPNMTSDRAWELTNQVHYEGQAIVWVGPQEQAELYHEQLLRAGLTMAPLEPEGS

SEQ ID NO: 5346 - protein, 95 aa, Thermosynechococcus elongatus
ASVVPQERQQVTRKHHPNYKVIVLNDDFNTFQHVAACLMKYIPNMTSDRAWELTNQVHYVGQAIVWVGPQEQAELYHEQLLRAGLTMAPLEPEGS

SEQ ID NO: 5347 - protein, 95 aa, Thermosynechococcus elongatus
ASVVPQERQQVTRKHHPNYKVIVLNDDFNTFQHVVACLKKYIPNMTSDRAWELTNQVHYVGLAIVWVGPQVQAELYHEQLLRAGLTMAPLEPGGS

SEQ ID NO: 5348 - protein, 52 aa, Thermosynechococcus elongatus
ASVVPQERQQVTRKHHPNYKVIVLNDDFNTFQHVVACLKKYIPNMISDRAWE

SEQ ID NO: 5349 - protein, 95 aa, Thermosynechococcus elongatus
ASVVPQERQQVTRKHHPNYKVIVLNDDFNTFQHVVACLKKYIPNMISDRAWELTNQVHYGGQAIVWVGPQEQAELNHEQLLRAGLTMAPLEPEGS

SEQ ID NO: 5350 - protein, 95 aa, Thermosynechococcus elongatus
ASVVPQERQQVTRKHHPNYKVIVLNDDFNTFQHVVACLKKYIPNMISDRAWELTNQVHYGGRAIVWVGPQEQAELYHEQLLRAGLTTAPLEPEGS

SEQ ID NO: 5351 - protein, 95 aa, Thermosynechococcus elongatus
ASVVPQERQQVTRKHHPNYKVIVLNDDFNTFQHVVACLKKYIPNMISDRAWELTNQVHYGGRAIVWVGPQEQAELYHEQLLRAGLTMDPLEPEGS

SEQ ID NO: 5352 - protein, 95 aa, Thermosynechococcus elongatus
ASVVPQERQQVTRKHHPNYKVIVLNDDFNTFQHVVACLKKYIPNMISDRAWELTNQVHYGGRAIVWVGPQEQAELYHEQLLRAGLTMAPLEPGGS

SEQ ID NO: 5353 - protein, 77 aa, Thermosynechococcus elongatus
ASVVPQERQQVTRKHHPNYKVIVLNDDFNTFQHVVACLKKYIPNMISDRAWELTNQVHYGGRAIVWVGPQEQAELYH

SEQ ID NO: 5354 - protein, 95 aa, Thermosynechococcus elongatus
ASVVPQERQQVTRKHHPNYKVIVLNDDFNTFQHVVACLKKYIPNMISDRAWELTNQVHYGGRAIVWVGPQVQAELYHEQLLRAGLTMAPLEPGGS

SEQ ID NO: 5355 - protein, 95 aa, Thermosynechococcus elongatus
ASVVPQERQQVTRKHHPNYKVIVLNDDFNTFQHVVACLKKYIPNMISDRAWELTNQVLYGGRAIVWVGPQEQAELYHEQLLRAGLTMAPLEPEGS

SEQ ID NO: 5356 - protein, 95 aa, Thermosynechococcus elongatus
ASVVPQERQQVTRKHHPNYKVIVLNDDFNTFRHDAACLMKYIPNMTSDRAWELTNQVHYEGQAIVWVGPQEQAELYHEQLLRAGLTMAPLEPEGS

SEQ ID NO: 5357 - protein, 95 aa, Thermosynechococcus elongatus
ASVVPQERQQVTRKHHPNYKVIVLNDDFNTFRHDAACLMKYIPNMTSDRAWELTNQVHFEGQAIVWVGPQEQAELYHEQLLRAGLTMAPLEPEGS

SEQ ID NO: 5358 - protein, 95 aa, Thermosynechococcus elongatus
ASVVPQERQQVTRKHHPNYKVIVLNDDFNTFRHGAACLMKYIPNMTSDRAWELTNQVHYAGQAIVWVGPQEQAELYHEHLLRAGLTMAPLEPEGS

SEQ ID NO: 5359 - protein, 95 aa, Thermosynechococcus elongatus; identical to SEQ ID NO: 1668

SEQ ID NO: 5360 - protein, 95 aa, Thermosynechococcus elongatus
ASVVPQERQQVTRKHHPNYKVIVLNDDFNTFRHVDACLMKYIPNMTSDRAWELTNQVHYEGQAIVWVGPQEQAELYHEQLLRAGLTMAPLEPEGS

SEQ ID NO: 5361 - protein, 36 aa, Thermosynechococcus elongatus
ASVVPQERQQVTRKHHPNYKVIVLNDDFNTFRHVAA

SEQ ID NO: 5362 - protein, 37 aa, Thermosynechococcus elongatus
ASVVPQERQQVTRKHHPNYKVIVLNDDFNTFRHVAAC

SEQ ID NO: 5363 - protein, 95 aa, Thermosynechococcus elongatus
ASVVPQERQQVTRKHHPNYKVIVLNDDFNTFRHVAACWMKYIPNMTSDRAWELTNQVHYEGQAIVWVGPQEQAELYHEQLLRAGLTMAPLEPEGS

SEQ ID NO: 5364 - protein, 95 aa, Thermosynechococcus elongatus
ASVVPQERQQVTRKHHPNYKVIVLNDDFNTFRHVAACLKKYIPNMISDRAWELTNQVHYEGQAIVWVGPQEQAELYHEQLLRAGLTMAPLEPEGS

SEQ ID NO: 5365 - protein, 95 aa, Thermosynechococcus elongatus
ASVVPQERQQVTRKHHPNYKVIVLNDDFNTFRHVAACLKKYIPNMISDRAWELTNQVHYGGRAIVWVGPQEQAELYHEQLLRAGLTRAPLEPEGS

SEQ ID NO: 5366 - protein, 95 aa, Thermosynechococcus elongatus; identical to SEQ ID NO: 415

SEQ ID NO: 5367 - protein, 95 aa, Thermosynechococcus elongatus
ASVVPQERQQVTRKHHPNYKVIVLNDDFNTFRHVAACLKKYIPNMISDRAWELTNQVHYGGRAIVWVGPQEQAELYHEQLLRVGLTMAPLEPEGS

SEQ ID NO: 5368 - protein, 95 aa, Thermosynechococcus elongatus
ASVVPQERQQVTRKHHPNYKVIVLNDDFNTFRHVAACLIKYIPNMTSDRAWELTNQVHYEGQAIVWVGPREQAELYHEQLLRVGLTMAPLEPEGS

SEQ ID NO: 5369 - protein, 52 aa, Thermosynechococcus elongatus
ASVVPQERQQVTRKHHPNYKVIVLNDDFNTFRHVAACLMSTSQTRLLTELGN

SEQ ID NO: 5370 - protein, 95 aa, Thermosynechococcus elongatus
ASVVPQERQQVTRKHHPNYKVIVLNDDFNTFRHVAACLMKHIPNMTSDRAWELTNQVHYEGQAIVWVGPQEQAELYHEQLLRAGLTMAPLEPGGS

SEQ ID NO: 5371 - protein, 95 aa, Thermosynechococcus elongatus
ASVVPQERQQVTRKHHPNYKVIVLNDDFNTFRHVAACLMKYITNMTSDRAWELTNQVHYEGQAIVCVGPQEQAELYHEQLLSAGLTMAPLEPEGS

SEQ ID NO: 5372 - protein, 95 aa, Thermosynechococcus elongatus
ASVVPQERQQVTRKHHPNYKVIVLNDDFNTFRHVAACLMKYIQNMTSDRAWELTNQVHYKGQAIVWVGPQEQAELNHEQLLRAGLTMAPLEPEGS

SEQ ID NO: 5373 - protein, 95 aa, Thermosynechococcus elongatus
ASVVPQERQQVTRKHHPNYKVIVLNDDFNTFRHVAACLMKYIPNKTSDRAWELTNQVHYEGQAIVWVGPKEQAELYHEQLLRAGLTMAPLEPEGS

SEQ ID NO: 5374 - protein, 95 aa, Thermosynechococcus elongatus; identical to SEQ ID NO: 103

SEQ ID NO: 5375 - protein, 89 aa, Thermosynechococcus elongatus
ASVVPQERQQVTRKHHPNYKVIVLNDDFNTFRHVAACLMKYIPNKTSDRAWELTNQVHYEGQAIVWVGPQEQAELYHEQLLRAGLTMAP

SEQ ID NO: 5376 - protein, 95 aa, Thermosynechococcus elongatus
ASVVPQERQQVTRKHHPNYKVIVLNDDFNTFRHVAACLMKYIPNKTSDRAWELTNQVHYEGQAIVWVGPQVQAELYHEQLLRAGLTMAPLEPGGS

SEQ ID NO: 5377 - protein, 95 aa, Thermosynechococcus elongatus
ASVVPQERQQVTRKHHPNYKVIVLNDDFNTFRHVAACLMKYIPNKTSDRAWELTNQVHYEGQAIVWVGPHEQAELYPEQLLRAGLTMAPLEPEGS

SEQ ID NO: 5378 - protein, 95 aa, Thermosynechococcus elongatus
ASVVPQERQQVTRKHHPNYKVIVLNDDFNTFRHVAACLMKYIPNKTSDRAWELTNQVHYGGQAIVWVGPQVQAELYHEQLLRAGLTMAPLEPGGS

SEQ ID NO: 5379 - protein, 95 aa, Thermosynechococcus elongatus
ASVVPQERQQVTRKHHPNYKVIVLNDDFNTFRHVAACLMKYIPNKTSDRAWELTNQVHYGGRAIVWVGPQEQAELYHEQLLRAGLTMAPLEPEGS

SEQ ID NO: 5380 - protein, 95 aa, Thermosynechococcus elongatus
ASVVPQERQQVTRKHHPNYKVIVLNDDFNTFRHVAACLMKYIPNKTSDRAWELTNQVHYVGQAIVWVGPQERAELYHEQLLRAGLTMAPLEPEGS

SEQ ID NO: 5381 - protein, 95 aa, Thermosynechococcus elongatus
ASVVPQERQQVTRKHHPNYKVIVLNDDFNTFRHVAACLMKYIPNKTSDRAWELTNQVHFEGQAIVWVGPQEQAELYHEQLLRAGLTMAPLEPEGS

SEQ ID NO: 5382 - protein, 95 aa, Thermosynechococcus elongatus; identical to SEQ ID NO: 1682

SEQ ID NO: 5383 - protein, 95 aa, Thermosynechococcus elongatus
ASVVPQERQQVTRKHHPNYKVIVLNDDFNTFRHVAACLMKYIPNMTPDRAWELTNQVHYEGQAIVWVGPQEQAELYHEQLLRAGLTMAPLEPEGS

SEQ ID NO: 5384 - protein, 95 aa, Thermosynechococcus elongatus; identical to SEQ ID NO: 10

SEQ ID NO: 5385 - protein, 95 aa, Thermosynechococcus elongatus
ASVVPQERQQVTRKHHPNYKVIVLNDDFNTFRHVAACLMKYIPNMTSDRDWELTNQVHYEGQAIVWVGPQEQAELYHEQLLRAGLTMDPLEPEGS

SEQ ID NO: 5386 - protein, 95 aa, Thermosynechococcus elongatus
ASVVPQERQQVTRKHHPNYKVIVLNDDFNTFRHVAACLMKYIPNMTSDRDWELTNQVHYEGQAIVWVGPQEQAELYHEQLLRAGLTMAPLEPEGS

SEQ ID NO: 5387 - protein, 95 aa, Thermosynechococcus elongatus
ASVVPQERQQVTRKHHPNYKVIVLNDDFNTFRHVAACLMKYIPNMTSDRAGELTNQVHYEGQAIVRVGPQEQAELYHKQLLRAGLTMAPLEPEGS

SEQ ID NO: 5388 - protein, 95 aa, Thermosynechococcus elongatus
ASVVPQERQQVTRKHHPNYKVIVLNDDFNTFRHVAACLMKYIPNMTSDRAWELTNKVHYEGQAIVWVGPQEQAELYHEQLLRAGLTMAPLEPEGS

SEQ ID NO: 5389 - protein, 95 aa, Thermosynechococcus elongatus
ASVVPQERQQVTRKHHPNYKVIVLNDDFNTFRHVAACLMKYIPNMTSDRAWELTNQGHYEGQAIVWVGPQEQAELYHEQLLRAGLTMAPLEPEGS

SEQ ID NO: 5390 - protein, 95 aa, Thermosynechococcus elongatus
ASVVPQERQQVTRKHHPNYKVIVLNDDFNTFRHVAACLMKYIPNMTSDRAWELTNQVHDEGQAIVWVGPQVQAELYHEQLLRAGLTMAPLEPGGS

SEQ ID NO: 5391 - protein, 95 aa, Thermosynechococcus elongatus
ASVVPQERQQVTRKHHPNYKVIVLNDDFNTFRHVAACLMKYIPNMTSDRAWELTNQVHYKGQAIVWVGPQEQAELNHEQLLRAGLTMAPLEPGGS

SEQ ID NO: 5392 - protein, 95 aa, Thermosynechococcus elongatus
ASVVPQERQQVTRKHHPNYKVIVLNDDFNTFRHVAACLMKYIPNMTSDRAWELTNQVHYKGQAIVWVGPHEQAELNHEQLLRAGLTMAPLEREGS

SEQ ID NO: 5393 - protein, 95 aa, Thermosynechococcus elongatus
ASVVPQERQQVTRKHHPNYKVIVLNDDFNTFRHVAACLMKYIPNMTSDRAWELTNQVHYKGQAIVWVGPQEQAELYHEQLLRAGLTMAPLEPEGS

SEQ ID NO: 5394 - protein, 95 aa, Thermosynechococcus elongatus; identical to SEQ ID NO: 10

SEQ ID NO: 5395 - protein, 95 aa, Thermosynechococcus elongatus
ASVVPQERQQVTRKHHPNYKVIVLNDDFNTFRHVAACLMKYIPNMTSDRAWELTNQVHYEGKAIVWVGPQVQAELYHEQLLRAGLTMAPLEPGGS

SEQ ID NO: 5396 - protein, 95 aa, Thermosynechococcus elongatus
ASVVPQERQQVTRKHHPNYKVIVLNDDFNTFRHVAACLMKYIPNMTSDRAWELTNQVHYEGQAIVRVGPQEQAELYHKQLLRAGLTMAPLEPEGS

SEQ ID NO: 5397 - protein, 95 aa, Thermosynechococcus elongatus
ASVVPQERQQVTRKHHPNYKVIVLNDDFNTFRHVAACLMKYIPNMTSDRAWELTNQVHYEGQAIVWVGPQEQAELYQEQLLRAGLTMAPLEPEGS

SEQ ID NO: 5398 - protein, 95 aa, Thermosynechococcus elongatus
ASVVPQERQQVTRKHHPNYKVIVLNDDFNTFRHVAACLMKYIPNMTSDRAWELTNQVHYEGQAIVWVGPQEQAELYHEQLWRAGLTMAPLEPEGS

SEQ ID NO: 5399 - protein, 95 aa, Thermosynechococcus elongatus; identical to SEQ ID NO: 10

SEQ ID NO: 5400 - protein, 95 aa, Thermosynechococcus elongatus
ASVVPQERQQVTRKHHPNYKVIVLNDDFNTFRHVAACLMKYIPNMTSDRAWELTNQVHYEGQAIVWVGPQEQAELYHEQLLRAGLTRAPLEPEGS

SEQ ID NO: 5401 - protein, 95 aa, Thermosynechococcus elongatus; identical to SEQ ID NO: 98

SEQ ID NO: 5402 - protein, 95 aa, Thermosynechococcus elongatus
ASVVPQERQQVTRKHHPNYKVIVLNDDFNTFRHVAACLMKYIPNMTSDRAWELTNQVHYEGQAIVWVGPQEQAELYHEQLLRAGLTMAPLEPKGS

SEQ ID NO: 5403 - protein, 93 aa, Thermosynechococcus elongatus
ASVVPQERQQVTRKHHPNYKVIVLNDDFNTFRHVAACLMKYIPNMTSDRAWELTNQVHYEGQAIVWVGPQEQAELYHEQLLRAGLTMAPLEPE

SEQ ID NO: 5404 - protein, 95 aa, Thermosynechococcus elongatus; identical to SEQ ID NO: 10

SEQ ID NO: 5405 - protein, 95 aa, Thermosynechococcus elongatus; identical to SEQ ID NO: 10

SEQ ID NO: 5406 - protein, 95 aa, Thermosynechococcus elongatus
ASVVPQERQQVTRKHHPNYKVIVLNDDFNTFRHVAACLMKYIPNMTSDRAWELTNQVHYEGQAIVWVGPQEQAELYHEQLLRAGLTMASLEPEGS

SEQ ID NO: 5407 - protein, 95 aa, Thermosynechococcus elongatus
ASVVPQERQQVTRKHHPNYKVIVLNDDFNTFRHVAACLMKYIPNMTSDRAWELTNQVHYEGQAIVWVGPQEQAELYHEQLLRAGLPMAPLEPEGS

SEQ ID NO: 5408 - protein, 95 aa, Thermosynechococcus elongatus
ASVVPQERQQVTRKHHPNYKVIVLNDDFNTFRHVAACLMKYIPNMTSDRAWELTNQVHYEGQAIVWVGPQEQAELYHEQLLIAGLTMAPLEPEGS

SEQ ID NO: 5409 - protein, 95 aa, Thermosynechococcus elongatus
ASVVPQERQQVTRKHHPNYKVIVLNDDFNTFRHVAACLMKYIPNMTSDRAWELTNQVHYEGQAIVWVGPQEQAELYHEHLLRAGLTMAPLEPEGS

SEQ ID NO: 5410 - protein, 95 aa, Thermosynechococcus elongatus
ASVVPQERQQVTRKHHPNYKVIVLNDDFNTFRHVAACLMKYIPNMTSDRAWELTNQVHYEGQAIVWVGPQEQAELYHEPLLRAGLTMAPLEPGGS

SEQ ID NO: 5411 - protein, 78 aa, Thermosynechococcus elongatus
ASVVPQERQQVTRKHHPNYKVIVLNDDFNTFRHVAACLMKYIPNMTSDRAWELTNQVHYEGQAIVWVGPQEQAELYHE

SEQ ID NO: 5412 - protein, 95 aa, Thermosynechococcus elongatus
ASVVPQERQQVTRKHHPNYKVIVLNDDFNTFRHVAACLMKYIPNMTSDRAWELTNQVHYEGQAIVWVGPQEQAELYHDQLLRAGLTMAPLEAEGS

SEQ ID NO: 5413 - protein, 77 aa, Thermosynechococcus elongatus
ASVVPQERQQVTRKHHPNYKVIVLNDDFNTFRHVAACLMKYIPNMTSDRAWELTNQVHYEGQAIVWVGPQEQAELYH

SEQ ID NO: 5414 - protein, 77 aa, Thermosynechococcus elongatus; identical to SEQ ID NO: 5413

SEQ ID NO: 5415 - protein, 95 aa, Thermosynechococcus elongatus
ASVVPQERQQVTRKHHPNYKVIVLNDDFNTFRHVAACLMKYIPNMTSDRAWELTNQVHYEGQAIVWVGPQEQAELYPEQLLRAGLTMAPLEPEGS

SEQ ID NO: 5416 - protein, 95 aa, Thermosynechococcus elongatus
ASVVPQERQQVTRKHHPNYKVIVLNDDFNTFRHVAACLMKYIPNMTSDRAWELTNQVHYEGQAIVWVGPQEQAELFHDQLLRAGLTMAPLEPGGS

SEQ ID NO: 5417 - protein, 95 aa, Thermosynechococcus elongatus
ASVVPQERQQVTRKHHPNYKVIVLNDDFNTFRHVAACLMKYIPNMTSDRAWELTNQVHYEGQAIVWVGPQEQAVLYLEQLLRAGLTMATLEPEGS

SEQ ID NO: 5418 - protein, 73 aa, Thermosynechococcus elongatus
ASVVPQERQQVTRKHHPNYKVIVLNDDFNTFRHVAACLMKYIPNMTSDRAWELTNQVHYEGQAIVWVGPQEQA

SEQ ID NO: 5419 - protein, 95 aa, Thermosynechococcus elongatus; identical to SEQ ID NO: 73

SEQ ID NO: 5420 - protein, 95 aa, Thermosynechococcus elongatus; identical to SEQ ID NO: 593

SEQ ID NO: 5421 - protein, 95 aa, Thermosynechococcus elongatus
ASVVPQERQQVTRKHHPNYKVIVLNDDFNTFRHVAACLMKYIPNMTSDRAWELTNQVHYEGQAIVWVGPQVQAELYHEQLLRAGLTMAPVEPGGS

SEQ ID NO: 5422 - protein, 95 aa, Thermosynechococcus elongatus
ASVVPQERQQVTRKHHPNYKVIVLNDDFNTFRHVAACLMKYIPNMTSDRAWELTNQVHYEGQAIVWVGPQVQAELYHEQLLRAGLTIAPLEPGGS

SEQ ID NO: 5423 - protein, 70 aa, Thermosynechococcus elongatus
ASVVPQERQQVTRKHHPNYKVIVLNDDFNTFRHVAACLMKYIPNMTSDRAWELTNQVHYEGQAIVWVGPQ

SEQ ID NO: 5424 - protein, 95 aa, Thermosynechococcus elongatus
ASVVPQERQQVTRKHHPNYKVIVLNDDFNTFRHVAACLMKYIPNMTSDRAWELTNQVHYEGQAIVWVGPREQAELYHEQLLRVGLTLAPLEPEGS

SEQ ID NO: 5425 - protein, 95 aa, Thermosynechococcus elongatus; identical to SEQ ID NO: 10

SEQ ID NO: 5426 - protein, 95 aa, Thermosynechococcus elongatus
ASVVPQERQQVTRKHHPNYKVIVLNDDFNTFRHVAACLMKYIPNMTSDRAWELTNQVHYEGQAIVWVCPQEQAELYHEQLLRAGLTMAPLEPEGS

SEQ ID NO: 5427 - protein, 95 aa, Thermosynechococcus elongatus
ASVVPQERQQVTRKHHPNYKVIVLNDDFNTFRHVAACLMKYIPNMTSDRAWELTNQVHYEGQAIVLVGPQEQAELYHEQLLRAGLTMAPLEPEGS

SEQ ID NO: 5428 - protein, 95 aa, Thermosynechococcus elongatus
ASVVPQERQQVTRKHHPNYKVIVLNDDFNTFRHVAACLMKYIPNMTSDRAWELTNQVHYEGQAIVLVGPQEQAELYHEQLLRAGLTMAPLEPGGS

SEQ ID NO: 5429 - protein, 95 aa, Thermosynechococcus elongatus
ASVVPQERQQVTRKHHPNYKVIVLNDDFNTFRHVAACLMKYIPNMTSDRAWELTNQVHYEGQAIVLVGPQEQAELYHEQLLRAVLTMAPLEPEGS

SEQ ID NO: 5430 - protein, 95 aa, Thermosynechococcus elongatus; identical to SEQ ID NO: 10

SEQ ID NO: 5431 - protein, 95 aa, Thermosynechococcus elongatus
ASVVPQERQQVTRKHHPNYKVIVLNDDFNTFRHVAACLMKYIPNMTSDRAWELTNQVHYEGQSIVWVGPQEQAELYHEQLLRAGLTMAPLEPEGS

SEQ ID NO: 5432 - protein, 95 aa, Thermosynechococcus elongatus
ASVVPQERQQVTRKHHPNYKVIVLNDDFNTFRHVAACLMKYIPNMTSDRAWELTNQVHYEGRAIVWVGPQEQAELYHEQLLRAGLTMAPLEPEGS

SEQ ID NO: 5433 - protein, 95 aa, Thermosynechococcus elongatus
ASVVPQERQQVTRKHHPNYKVIVLNDDFNTFRHVAACLMKYIPNMTSDRAWELTNQVHYEGLAIVWVGPQEQAELYHEHLLRAGLTMAPLEPEGS

SEQ ID NO: 5434 - protein, 95 aa, Thermosynechococcus elongatus
ASVVPQERQQVTRKHHPNYKVIVLNDDFNTFRHVAACLMKYIPNMTSDRAWELTNQVHYEGLAIVWVGPQEQAELYHEQLLRAGLTMAPLEPEGS

SEQ ID NO: 5435 - protein, 95 aa, Thermosynechococcus elongatus
ASVVPQERQQVTRKHHPNYKVIVLNDDFNTFRHVAACLMKYIPNMTSDRAWELTNQVHYEGLAIVWVGPQEQAVLYHEQLLRAGLTMAPLEPEGS

SEQ ID NO: 5436 - protein, 95 aa, Thermosynechococcus elongatus
ASVVPQERQQVTRKHHPNYKVIVLNDDFNTFRHVAACLMKYIPNMTSDRAWELTNQVHYECQAIVWVGPQEQAELYHEQLLRAGLTMAPLEPEGS

SEQ ID NO: 5437 - protein, 95 aa, Thermosynechococcus elongatus
ASVVPQERQQVTRKHHPNYKVIVLNDDFNTFRHVAACLMKYIPNMTSDRAWELTNQVHYDGQAIVWVGPQEQAELYHEQLLRAGLTMAPLEPEGS

SEQ ID NO: 5438 - protein, 95 aa, Thermosynechococcus elongatus; identical to SEQ ID NO: 158

SEQ ID NO: 5439 - protein, 95 aa, Thermosynechococcus elongatus; identical to SEQ ID NO: 158

SEQ ID NO: 5440 - protein, 95 aa, Thermosynechococcus elongatus; identical to SEQ ID NO: 158

SEQ ID NO: 5441 - protein, 71 aa, Thermosynechococcus elongatus
ASVVPQERQQVTRKHHPNYKVIVLNDDFNTFRHVAACLMKYIPNMTSDRAWELTNQVHYGGRAIVWVGPQE

SEQ ID NO: 5442 - protein, 95 aa, Thermosynechococcus elongatus; identical to SEQ ID NO: 1677

SEQ ID NO: 5443 - protein, 81 aa, Thermosynechococcus elongatus
ASVVPQERQQVTRKHHPNYKVIVLNDDFNTFRHVAACLMKYIPNMTSDRAWELTNQVHYVGQAIVWVGPQVQAVLYPEQLL

SEQ ID NO: 5444 - protein, 95 aa, Thermosynechococcus elongatus
ASVVPQERQQVTRKHHPNYKVIVLNDDFNTFRHVAACLMKYIPNMTSDRAWELTNQVHCEGQAIVWVGPQEQAELYHEQLLRAGLTMAPLEPEGS

SEQ ID NO: 5445 - protein, 95 aa, Thermosynechococcus elongatus
ASVVPQERQQVTRKHHPNYKVIVLNDDFNTFRHVAACLMKYIPNMTSDRAWELTNQVHFEGQAIVWVGPQEQAELYHEQLLRAGLTMAPLEPGGS

SEQ ID NO: 5446 - protein, 95 aa, Thermosynechococcus elongatus
ASVVPQERQQVTRKHHPNYKVIVLNDDFNTFRHVAACLMKYIPNMTSDRAWELTNQVLYEGQAIVWVGPQEQAELYLEQLLRAGLTMAPLEPEGS

SEQ ID NO: 5447 - protein, 95 aa, Thermosynechococcus elongatus
ASVVPQERQQVTRKHHPNYKVIVLNDDFNTFRHVAACLMKYIPNMTSDRAWELTNQVYYEGQAIVWVGPQEQAELYHEQLLRAGLTMAPLEPEGS

SEQ ID NO: 5448 - protein, 95 aa, Thermosynechococcus elongatus; identical to SEQ ID NO: 10

SEQ ID NO: 5449 - protein, 95 aa, Thermosynechococcus elongatus
ASVVPQERQQVTRKHHPNYKVIVLNDDFNTFRHVAACLMKYIPNMTSDRAWEFTNQVHYEGQAIVWVGPQEQAELYHEQLLRAGLTMAPLEPEGS

SEQ ID NO: 5450 - protein, 95 aa, Thermosynechococcus elongatus
ASVVPQERQQVTRKHHPNYKVIVLNDDFNTFRHVAACLMKYIPNMTSDRAWDLTNQVHYEGQAIVWVGPQEQAELYHEQLLRAGLTMAPLEPEGS

SEQ ID NO: 5451 - protein, 51 aa, Thermosynechococcus elongatus
ASVVPQERQQVTRKHHPNYKVIVLNDDFNTFRHVAACLMKYIPNMTSDRAW

SEQ ID NO: 5452 - protein, 95 aa, Thermosynechococcus elongatus
ASVVPQERQQVTRKHHPNYKVIVLNDDFNTFRHVAACLMKYIPNMTSYRAWELTNQVHYEGQAIVWVGPQEQAELYHEQLWRAGLTMAPLEPEGS

SEQ ID NO: 5453 - protein, 95 aa, Thermosynechococcus elongatus
ASVVPQERQQVTRKHHPNYKVIVLNDDFNTFRHVAACLMKYIPNMTSYRAWELTNQVHYEGQAIVWVGPQEQAELYHEQLLRAGLTMAPLEPEGS

SEQ ID NO: 5454 - protein, 95 aa, Thermosynechococcus elongatus
ASVVPQERQQVTRKHHPNYKVIVLNDDFNTFRHVAACLMKYIPNMSSDRAWELTNQVHYGGRAIVWVGPQEQAELYHEQLLRAGLTMAPLEPEGS

SEQ ID NO: 5455 - protein, 95 aa, Thermosynechococcus elongatus
ASVVPQERQQVTRKHHPNYKVIVLNDDFNTFRHVAACLMKYIPNMISDRAWELTNQVHYEGQAIVWVGPQVQAELYHEQLLRAGLTMAPLEPGGS

SEQ ID NO: 5456 - protein, 95 aa, Thermosynechococcus elongatus; identical to SEQ ID NO: 247

SEQ ID NO: 5457 - protein, 95 aa, Thermosynechococcus elongatus
ASVVPQERQQVTRKHHPNYKVIVLNDDFNTFRHVAACLMKYIPNMISDRAWELTNQVHYGGRAIVWVGPQVQAELYHEQLLRAGLTMAPLEPGGS

SEQ ID NO: 5458 - protein, 95 aa, Thermosynechococcus elongatus; identical to SEQ ID NO: 177

SEQ ID NO: 5459 - protein, 95 aa, Thermosynechococcus elongatus; identical to SEQ ID NO: 5391

SEQ ID NO: 5460 - protein, 95 aa, Thermosynechococcus elongatus; identical to SEQ ID NO: 5393

SEQ ID NO: 5461 - protein, 95 aa, Thermosynechococcus elongatus
ASVVPQERQQVTRKHHPNYKVIVLNDDFNTFRHVAACLMKYIPNMTSDRAWELTNQVHYKGQAIVWVVPQEQAELNHEQLLRAGLTMAPLEPEGS

SEQ ID NO: 5462 - protein, 95 aa, Thermosynechococcus elongatus; identical to SEQ ID NO: 73

SEQ ID NO: 5463 - protein, 95 aa, Thermosynechococcus elongatus; identical to SEQ ID NO: 158

SEQ ID NO: 5464 - protein, 95 aa, Thermosynechococcus elongatus
ASVVPQERQQVTRKHHPNYKVIVLNDDFNTFRHVAACLMKYIPHMTSDRAWELTNQVHYEGQAIVWVGPQEQAELYHEQLLRAGLTMAPLEPEGS

SEQ ID NO: 5465 - protein, 95 aa, Thermosynechococcus elongatus
ASVVPQERQQVTRKHHPNYKVIVLNDDFNTFRHVAACLMKYIPDMTSDRAWELTNQVHYEGQAIVWVGPQEQAELYHEQLLRAGLTMAPLEPEGS

SEQ ID NO: 5466 - protein, 95 aa, Thermosynechococcus elongatus
ASVVPQERQQVTRKHHPNYKVIVLNDDFNTFRHVAACLMNYIPNMTSDRAWELTNQVHYEGQAIVWVGPQEQAELYHEQLLRAGLTMAPLEPEGS

SEQ ID NO: 5467 - protein, 95 aa, Thermosynechococcus elongatus
ASVVPQERQQVTRKHHPNYKVIVLNDDFNTFRHVAACLMRYIPNMTSDRAWELTNQVHYEGQAIVWVGPQEQAELYHEQLLRAGLTMAPLEPEGS

SEQ ID NO: 5468 - protein, 95 aa, Thermosynechococcus elongatus
ASVVPQERQQVTRKHHPNYKVIVLNDDFNTFRHVAAFLMKYIPNMTSDRAWELTNQVHYEGQAIVWVGPQEQAELYHEQLLRAGLTMAPLEPEGS

SEQ ID NO: 5469 - protein, 95 aa, Thermosynechococcus elongatus
ASVVPQERQQVTRKHHPNYKVIVLNDDFNTFRHVAACLMKYIPNMTADRAWELTNQVHYEGQAIVWVGPQVQAELYHEQLLRAGLTMAPLEPGGS

SEQ ID NO: 5470 - protein, 95 aa, Thermosynechococcus elongatus
ASVVPQERQQVTRKHHPNYKVIVLNDDFNTFRHVASCLMKYIPNMTSDRAWELTNQVHYEGQAIVWVGPQEQAELYHEQLLRAGLTMAPLEPEGS

SEQ ID NO: 5471 - protein, 95 aa, Thermosynechococcus elongatus
ASVVPQERQQVTRKHHPNYKVIVLNDDFNTFRHVASCLMKYIPNMTSDRAWELTNQVHYEGQAIVWVGPQEQAELYHEQLLRAGLTMAPLEPGGS

SEQ ID NO: 5472 - protein, 95 aa, Thermosynechococcus elongatus
ASVVPQERQQVTRKHHPNYKVIVLNDDFNTFRHFAACLMKYIPNKTSDRAWELTNHVHYEGQAIVWVGPQEQAELYHEQLLRAGLTMAPLEPEGS

SEQ ID NO: 5473 - protein, 95 aa, Thermosynechococcus elongatus
ASVVPQERQQVTRKHHPNYKVIVLNDDFNTFRHFAACLMKYIPNMTSDRAWELTNQVHYEGQAIVWVGPQEQAELYHEQLLRAGLTMAPLEPEGS

SEQ ID NO: 5474 - protein, 95 aa, Thermosynechococcus elongatus; identical to SEQ ID NO: 10

SEQ ID NO: 5475 - protein, 95 aa, Thermosynechococcus elongatus
ASVVPQERQQVTRKHHPNYKVIVLNDDFNTFRHVAACLMKYIPNMTSDRAWELTNQVHYDGQAIVWVGPQEQAELYHEQLLRAGLTMAPLEPGGS

SEQ ID NO: 5476 - protein, 95 aa, Thermosynechococcus elongatus
ASVVPQERQQVTRKHHPNYKVIVLNDDFNTFLHVDACLKKYIPNMISDRAWELTNQVHYGGRAIVWVGPQEQAELYHEQLLRAGLTMAPLEPEGS

SEQ ID NO: 5477 - protein, 95 aa, Thermosynechococcus elongatus
ASVVPQERQQVTRKHHPNYKVIVLNDDFSTFRHVAACLMKYIPNMTSDRAWELTNQVHYEGQAIVWVGPQEQAELYHEQLLRAGLTMAPLEPEGS

SEQ ID NO: 5478 - protein, 95 aa, Thermosynechococcus elongatus
ASVVPQERQQVTRKHHPNYKVIVLNDDFFTFRHVAACLMKYIPNMTSDRAWELTNQVHYEGQAIVWVGPQEQAELYHEQLLRAGLTMAPLEPEGS

SEQ ID NO: 5479 - protein, 95 aa, Thermosynechococcus elongatus
ASVVPQERQQVTRKHHPNYKVIVLNDYFNTFRHVAACLMKYIPNMTSDRAWELTNQVHYEGQAIVCVGPQEQAELYHEQLLRAGLTMAPLEPEGS

SEQ ID NO: 5480 - protein, 95 aa, Thermosynechococcus elongatus
ASVVPQERQQVTRKHHPNYKVIVLDDDFNTFRHVAACLMKYIPNKTSDRAWELTNQVHYEGQAIVWVGPQEQAELYHEQLLRAGLTMAPLEPEGS

SEQ ID NO: 5481 - protein, 95 aa, Thermosynechococcus elongatus
ASVVPQERQQVTRKHHPNYKVIVLDDDFNTFRHVAACLMKYIPNMTSDRAWELTNQVHYEGQAIVWVGPQEQAELYHEQLLRAGLTMAPLEPEGS

SEQ ID NO: 5482 - protein, 95 aa, Thermosynechococcus elongatus
ASVVPQERQQVTRKHHPNYKVIVLYDDFITFRHVAACLMKYIPNMTSDRAWELTNQVQYEGQAIDWFGPQEQAELYHEQLFRAGLTMAPLEPEGS

SEQ ID NO: 5483 - protein, 95 aa, Thermosynechococcus elongatus
ASVVPQERQQVTRKHHPNYKVIVFNDDFNTFRHVAACLMKYIPNMTSDRAWELTNQVHYEGQAIVWVGPQEQAELYHEQLLRAGLTMAPLEPEGS

SEQ ID NO: 5484 - protein, 95 aa, Thermosynechococcus elongatus
ASVVPQERQQVTRKHHPNYKVRVLNDDFNTFRHVAACLMKYIPNMTSDRAWELTNQVHYEGQAIVWVGPQEQAELYHEQLLRAGLTMAPLEPEGS

SEQ ID NO: 5485 - protein, 95 aa, Thermosynechococcus elongatus
ASVVPQERQQVTRKHHPNYKVIILNDDFNTFQHVAACLMKYIPNMTSDRAWELTNQVHYEGQAIVRVGPQEQAELYHKQLLRAGLTMAPLEPEGS

SEQ ID NO: 5486 - protein, 95 aa, Thermosynechococcus elongatus
ASVVPQERQQVTRKHHPNYKVIILNDDFNTFRHVAACLMKYIPNMTSDRAWELTNQVHYEGQAIVWVGPQEQAELYHEQLLRAGLTMAPLEPEGS

SEQ ID NO: 5487 - protein, 95 aa, Thermosynechococcus elongatus
ASVVPQERQQVTRKHHPNYKVIVLNDDFNTFQHVVACLKKYIPNMISDRAWELTNQVHYKGQAIVWVGPQEQAELNHEQLLRAGLTMAPLEPEGS

SEQ ID NO: 5488 - protein, 95 aa, Thermosynechococcus elongatus; identical to SEQ ID NO: 133

SEQ ID NO: 5489 - protein, 95 aa, Thermosynechococcus elongatus
ASVVPQERQQVTRKHHPNYKVIVLNDDFNTFQHVVACLMKYIPNKTSDRAWELTNQVHYEGQAIVWVGPQEQAELYHEQLLRAGLTMAPLEPEGS

SEQ ID NO: 5490 - protein, 95 aa, Thermosynechococcus elongatus
ASVVPQERQQVTRKHHPNYKVIVLNDDFNTFRHGAACLMKYIPNMTSDRAWELTNQVHYEGQAIVWVGPQVQAELYHEQLLRAGLTMAQLEPGGS

SEQ ID NO: 5491 - protein, 95 aa, Thermosynechococcus elongatus; identical to SEQ ID NO: 103

SEQ ID NO: 5492 - protein, 95 aa, Thermosynechococcus elongatus; identical to SEQ ID NO: 415

SEQ ID NO: 5493 - protein, 95 aa, Thermosynechococcus elongatus; identical to SEQ ID NO: 177

SEQ ID NO: 5494 - protein, 95 aa, Thermosynechococcus elongatus; identical to SEQ ID NO: 416

SEQ ID NO: 5495 - protein, 95 aa, Thermosynechococcus elongatus; identical to SEQ ID NO: 73

SEQ ID NO: 5496 - protein, 95 aa, Thermosynechococcus elongatus
ASVVPQERQQVTRKHHPYYKVIVLNDDFNTFRHVAACLMKYIPNMTSDRAWELTNQVHYEGQAIVWVGPQEQAELYHEQLLRAGLTMAPLEPEGS

SEQ ID NO: 5497 - protein, 95 aa, Thermosynechococcus elongatus
ASVVPQERQQVTRKHLPNYKVIVLNDDFNTFRHVAACLMKYIPNMTSDRAWELTNQVHYEGQAIVWVGPQEQAELYHEQLLRAGLTMAPLEPEGS

SEQ ID NO: 5498 - protein, 95 aa, Thermosynechococcus elongatus
ASVVPQERQQVTRKHDTKYKVIVLNDDFNTFRHVAACLMKYIPNMTSDRAWELTNQVHYKGQAIVWVGPQEQAELNHEQLLRAGLTMAPLEPEGS

SEQ ID NO: 5499 - protein, 95 aa, Thermosynechococcus elongatus
ASVVPQERQQVTRKHDPNYKVIVLNDDFNTFQHVVACLKKYIPNMISDRAWELTNQVHYGGRAIVWVGPQEQAELYHEQLLRAGLTMAPLEPEGS

SEQ ID NO: 5500 - protein, 15 aa, Thermosynechococcus elongatus
ASVVPQERQQVTRKH

SEQ ID NO: 5501 - protein, 95 aa, Thermosynechococcus elongatus
ASVVPQERQQVTRKHYTNYKVIDLKDDYNTFRNVAACLMKYIPNMTSDRAWELTNQVHYEGQAIVWVGPQEQAELYHEQLLRAGLTLAPLEPEGS

SEQ ID NO: 5502 - protein, 95 aa, Thermosynechococcus elongatus
ASVVPQERQQVTRKHYTNYKVIVLNDDFNTFQHVVACLKKYIPNMISDRAWELTNQVHYGGRAIVWVGPQEQAELYHEQLLRAGLTMAPLEPEGS

SEQ ID NO: 5503 - protein, 95 aa, Thermosynechococcus elongatus; identical to SEQ ID NO: 5502

SEQ ID NO: 5504 - protein, 95 aa, Thermosynechococcus elongatus
ASVVPQERQQVTRKHYTNYKVIVLNDDFNTFRHVAECLMKYIPNMTSDRAWELTNQVHYKGQAIVCVGPQEQAELNHEQLLRAGLTIAPLEPEGS

SEQ ID NO: 5505 - protein, 95 aa, Thermosynechococcus elongatus
ASVVPQERQQVTRKHYTNYKVIVLNDDFNTFRHVAACLMKYIPNMTSDRAWELTNQVHYKGQAIVWVGPQEQAELYHEQLLRAGLTMAPLEPEGS

SEQ ID NO: 5506 - protein, 95 aa, Thermosynechococcus elongatus
ASVVPQERQQVTRKHYTNYKVIVLNDDFNTFRHVAACLMKYIPNMTSDRAWELTYQVHYKGQAIVWVGPQEQAELNHEQLLRAGLTMAPLEPEGS

SEQ ID NO: 5507 - protein, 36 aa, Thermosynechococcus elongatus
ASVVPQERQQVTRKHYTNYKFIVLNDDFNTFRHVAA

SEQ ID NO: 5508 - protein, 95 aa, Thermosynechococcus elongatus
ASVVPQERQQVTRKHYQNYKVIVLNDDFNTYRHVAECLMKYIPNMTSDRAWELTNQVHYKGQAIVWVGPQEQAELNHEQLLRAGLTMAPLEPEGS

SEQ ID NO: 5509 - protein, 95 aa, Thermosynechococcus elongatus
ASVVPQERQQVTRKHYQNYKVIVLNDDFNTFQHVVACLKKYIPNMISDRAWELTNQVHYGGRAIVWVGPQEQAELYHEQLLRAGLTMAPLEPEGS

SEQ ID NO: 5510 - protein, 95 aa, Thermosynechococcus elongatus
ASVVPQERQQVTRKHYQNYKVIVLNDDFNTFRHVAACLMKYIPNMTSDRAWELTNQVHYEGQAIVWVGPQEQAELYHEQLLRAGLTMAPLEPEGS

SEQ ID NO: 5511 - protein, 95 aa, Thermosynechococcus elongatus
ASVVPQERQQVTRKHYQNYKVIVLNDDFNTFRHVAACLMKYIPNMTSDRAWELTNQVHYEGQAIVWVGPQEQAELYHEQLLRAGLTMAPLEPGGS

SEQ ID NO: 5512 - protein, 95 aa, Thermosynechococcus elongatus; identical to SEQ ID NO: 5510

SEQ ID NO: 5513 - protein, 95 aa, Thermosynechococcus elongatus
ASVVPQERQQVTRKHYQNYKVIVLNDDFNTFRHVAACLMKYIPNMTSDRAWELTNQVHYKGQAIVCVGPQEQAELNHEQLLRAGLTMAPLEPEGS

SEQ ID NO: 5514 - protein, 95 aa, Thermosynechococcus elongatus; identical to SEQ ID NO: 5510

SEQ ID NO: 5515 - protein, 95 aa, Thermosynechococcus elongatus
ASVVPQERQQVTRKHYQNYKVIVLNDDFNTFRHVAACLMKYIPNMTSDRAWELTNQVHYGGRAIVWVGPQEQAELYHEQLLRAGLTMAPLEPEGS

SEQ ID NO: 5516 - protein, 23 aa, Thermosynechococcus elongatus
ASVVPQERQQVTRKHYPNNKVIV

SEQ ID NO: 5517 - protein, 95 aa, Thermosynechococcus elongatus
ASVVPQERQQVTRKHYPNYKDIVLNDDFNTFRHVDACLMKLIPNMISDRAWELTNQVLYEGQAIVWVGPHEIALLFHEQLLRAGLTMAKLDPVGS

SEQ ID NO: 5518 - protein, 95 aa, Thermosynechococcus elongatus
ASVVPQERQQVTRKHYPNYKDIVLNDDFNTFRHLAACLMKYIPNMTSDRAWELTNQVHYKGQAIVWVGPQEQAELNHEQLLRAGLTMAPLEPEGS

SEQ ID NO: 5519 - protein, 23 aa, Thermosynechococcus elongatus
ASVVPQERQQVTRKHYPNYKDIV

SEQ ID NO: 5520 - protein, 37 aa, Thermosynechococcus elongatus
ASVVPQERQQVTRKHYPNYKDIVLNDDYNTFRHVAAC

SEQ ID NO: 5521 - protein, 77 aa, Thermosynechococcus elongatus
ASVVPQERQQVTRKHYPNYKDIVLNDDFNTFRHVAACLMKYITNMTSDRAWELTNQVHYTGQAIVWVGPQEQAELIH

SEQ ID NO: 5522 - protein, 95 aa, Thermosynechococcus elongatus
ASVVPQERQQVTRKHYPNYKDIVLNDDFNTFRHVAACLMKYIPNMTSDRAWELTNHVHYEGQAIVCVGPQELAELYLEQLLRTGLTMAPLEPEGS

SEQ ID NO: 5523 - protein, 95 aa, Thermosynechococcus elongatus
ASVVPQERQQVTRKHYPNYKDIVLNDDFNTFRHVAACLMKYIPNMTSDRDWELTNQVHYKGQAIVWVGPLEQAELNHEQLLRAGLTMAPLEPEGS

SEQ ID NO: 5524 - protein, 95 aa, Thermosynechococcus elongatus
ASVVPQERQQVTRKHYPNYKDIVLNDDFNTFRHVAACLMKYIPNMTSDRACELTNQVHYKGQAIVWVGPQEQAELNHEQLLRAGLTMAPLEPEGS

SEQ ID NO: 5525 - protein, 95 aa, Thermosynechococcus elongatus
ASVVPQERQQVTRKHYPNYKDIVLNDDFNTFRHVAACLMKYIPNMTSDRAWELTNQVHYKGQAIVWVGPQEQAELNHEQLWRAGLTMAPLEPEGS

SEQ ID NO: 5526 - protein, 95 aa, Thermosynechococcus elongatus
ASVVPQERQQVTRKHYPNYKDIVLNDDFNTFRHVAACLMKYIPNMTSDRAWELTNQVHYKGQAIVWVGPQEQAELNHEQLLRAGLTMAPLEPEGS

SEQ ID NO: 5527 - protein, 95 aa, Thermosynechococcus elongatus
ASVVPQERQQVTRKHYPNYKDIVLNDDFNTFRHVAACLMKYIPNMTSDRAWELTNQVHNTGQAIVWVGPQEQAELNHEQLLRAGLTLAPLEPEGS

SEQ ID NO: 5528 - protein, 95 aa, Thermosynechococcus elongatus
ASVVPQERQQVTRKHYPNYKAIVLNDYFNTFRHVAACLMKYIPNMTSDRAWELTNQVHYTGQAIVWVGPQEQAELNHEQLLRAGLTMAPLEPEGS

SEQ ID NO: 5529 - protein, 95 aa, Thermosynechococcus elongatus
ASVVPQERQQVTRKHYPNYKGIVLNDDFNTFRHVTACLMKYIPNKTSDRAWELTNQVHYEGQAIVWVGPQEQAELYHEQLLRAGLTMAPLEPEGS

SEQ ID NO: 5530 - protein, 95 aa, Thermosynechococcus elongatus
ASVVPQERQQVTRKHYPNYKGIVLNDDFNTFRHVAACLMKYIPNMTSDRAWELTNQVHYEGQAIVWVGPQEQAELYHEQLLRTGLTMAPLEPEGS

SEQ ID NO: 5531 - protein, 95 aa, Thermosynechococcus elongatus
ASVVPQERQQVTRKHYPNYKGIVLNDDFNTFRHVAACLMKYIPNMTSDRAWELTNQVHYEGQAIVWVGPQEQAELYHEQLLRAGLTMAPLEPEGS

SEQ ID NO: 5532 - protein, 95 aa, Thermosynechococcus elongatus
ASVVPQERQQVTRKHYPNYKGIVLNDDFNTFRHVAACLMKYIPNMTSDRAWELTNQVHYKCQAIVWVGPQEQAELNHEQLLRAGLTMAPLEPEGS

SEQ ID NO: 5533 - protein, 95 aa, Thermosynechococcus elongatus
ASVVPQERQQVTRKHYPNYKGIVLNDDFNTFRHVAACLMKYIPNMTSDRAWELTNQVHYEGQAIVWVGPQVQAELYHEQLLRAGLTMAPLEPGGS

SEQ ID NO: 5534 - protein, 95 aa, Thermosynechococcus elongatus
ASVVPQERQQVTRKHYPNYKGIVLNDDFYTFRHVAACLMKYIPNMTSDRAWELTNQVHYKGQAIVWVGPQEQAELNHEQLLRAGLTMAPLEPEGS

SEQ ID NO: 5535 - protein, 37 aa, Thermosynechococcus elongatus
ASVVPQERQQVTRKHYPNYKGIVLNDEFNTFRHVAAC

SEQ ID NO: 5536 - protein, 74 aa, Thermosynechococcus elongatus
ASVVPQERQQVTRKHYPNYKVIVLNDDFNTFRHGAACLMKYIPKMTSDRAWELTNHVHYKAQAIVWVGPQEQAE

SEQ ID NO: 5537 - protein, 95 aa, Thermosynechococcus elongatus; identical to SEQ ID NO: 15

SEQ ID NO: 5538 - protein, 95 aa, Thermosynechococcus elongatus; identical to SEQ ID NO: 25

SEQ ID NO: 5539 - protein, 95 aa, Thermosynechococcus elongatus; identical to SEQ ID NO: 154

SEQ ID NO: 5540 - protein, 95 aa, Thermosynechococcus elongatus; identical to SEQ ID NO: 87

SEQ ID NO: 5541 - protein, 95 aa, Thermosynechococcus elongatus
ASVVPQERQQVTRKHYPNYKVIVLNDDFNTFRHVAACLMKYIPNMTSDRAWELTNQVHYGGRAIVWVGPQEQAELYHEQLLRAGLTRAPLEPEGS

SEQ ID NO: 5542 - protein, 95 aa, Thermosynechococcus elongatus
ASVVPQERQQVTRKHYPNYKVTVLNDDFNTFRHVAACLMKYIPNMTSDRAWELTNQVHYKGQAIVWVGPQEQAELNHEQLLRAGLTMAPLEPEGS

SEQ ID NO: 5543 - protein, 95 aa, Thermosynechococcus elongatus
ASVVPQERQQVTRKHYPNYKVRVLNDDFNTFRHVAACLMKYIPNMTSDRAWELTNQVHYTGQAIVWVGPQEQAELNHEQLWRAGLTMAPLEPEGS

SEQ ID NO: 5544 - protein, 95 aa, Thermosynechococcus elongatus
ASVVPQERQQVTRKHYPNYKVRVLNDDFNTFQHVVACLKKYIPNMISDRAWELTNQVHYGGRAIVWVGPQEQAELYHEQLLRAGLTMAPLEPEGS

SEQ ID NO: 5545 - protein, 95 aa, Thermosynechococcus elongatus
ASVVPQERQQVTRKHYPNYKVRVLNDDFNTFRHVAACLMKYIPNMTSDRAWELTNQVHYEGQAIVWVGPQEQAELYHEQLLRAGLTMAPLEPEGS

SEQ ID NO: 5546 - protein, 95 aa, Thermosynechococcus elongatus
ASVVPQERQQVTRKHYPNYKVRVLNDDFNTFRHVAACVMKYIPNMTSDRAWELTNQVHYKGQAIVWVGPQEQAELNHEQLLRAGLTMAPLEPEGS

SEQ ID NO: 5547 - protein, 95 aa, Thermosynechococcus elongatus
ASVVPQERQQVTRKHYPNYKVRVLNDDFNTFRHVAACLMKYIPNMTSDRAWELTNQVHYKGQAIVWVGPQEQAELYHEQLLRAGLTMAPLEPGGS

SEQ ID NO: 5548 - protein, 95 aa, Thermosynechococcus elongatus
ASVVPQERQQVTRKHYPNYKVRVLNDDFNTFRHVAACLMKYIPNMTSDRAWELTNQVHYNGQAIVWVGPQEQAELYHEQLLRAGLTMAPLEPEGS

SEQ ID NO: 5549 - protein, 95 aa, Thermosynechococcus elongatus
ASVVPQERQQVTRKHYPNYKVIILNDDFNTFQHVAACLKKYIPNMISDRAWELTNQVHYGGRAIVWVGPQEQAELYHEQLLRAGLTMAPLEPEGS

SEQ ID NO: 5550 - protein, 95 aa, Thermosynechococcus elongatus
ASVVPQERQQVTRKHYPNYKVIILNDDFNTFQHVAACLMKYIPNMTSDRAWELTNQVHYEGQAIVWVGPQEQAELYHEQLLRAGLTMAPLEPEGS

SEQ ID NO: 5551 - protein, 95 aa, Thermosynechococcus elongatus
ASVVPQERQQVTRKHYPNYKVIILNDDFNTFQHVAACLMKYIPNMTSDRAWELTNQVHYEGQAIVWVGPQVQAELYHEQLLRAGLTMAPLEPGGS

SEQ ID NO: 5552 - protein, 95 aa, Thermosynechococcus elongatus
ASVVPQERQQVTRKHYPNYKVIILNDDFNTFQHVVACLKKYIPNMISDRAWELTNQVHYKGQAIVWVGPQEQAELNHEQLLRAGLTMAPLEPEGS

SEQ ID NO: 5553 - protein, 23 aa, Thermosynechococcus elongatus
ASVVPQERQQVTRKHYPNYKVIV

SEQ ID NO: 5554 - protein, 95 aa, Thermosynechococcus elongatus
ASVVPQERQQVTRKHYPNYKVIDLNDDFNTFRHVAACLMKYIPNMTSDRAWELTNQVHYKGQAIVWVGPQEQAELNHEQLLRAGLTMAPLEPEGS

SEQ ID NO: 5555 - protein, 36 aa, Thermosynechococcus elongatus
ASVVPQERQQVTRKHYPNYKVIDLNYDFNTFRHVAA

SEQ ID NO: 5556 - protein, 95 aa, Thermosynechococcus elongatus
ASVVPQERQQVTRKHYPNYKVIALNDDFNTFRHVAACLMKYIPNMTSDRAWELTNQVHYEGQAIVWVGPQEQAELYHEQLLRAGLTMAPLEPEGS

SEQ ID NO: 5557 - protein, 59 aa, Thermosynechococcus elongatus
ASVVPQERQQVTRKHYPNYKVIVLNDDYNTIRHVAACLMKYIPNMTSDRAWELTNQVHY

SEQ ID NO: 5558 - protein, 95 aa, Thermosynechococcus elongatus
ASVVPQERQQVTRKHYPNYKVIVLNDDFNTFRHVAACLMKYIPNMTSDRAWELTNQVHYKGQAIVWVGPQEQADLNHELLLRAGLTMAPLEQEGS

SEQ ID NO: 5559 - protein, 95 aa, Thermosynechococcus elongatus
ASVVPQERQQVTRKHYPNYKVIVWNVDFNTFQHVVACLKKYIPNMISDRAWELTNQVHYGGRAIVWVGPQEQAELYHEQLLRAGLTMAPLEPEGS

SEQ ID NO: 5560 - protein, 95 aa, Thermosynechococcus elongatus; identical to SEQ ID NO: 489

SEQ ID NO: 5561 - protein, 95 aa, Thermosynechococcus elongatus
ASVVPQERQQVTRKHYPNYKVIVLNDVFNTFRHVAACLMKYIPNMTSDRAWELTNQVHYKGQAIVWVGPQEQAELNHEQLLRAGLTMAPLEPEGS

SEQ ID NO: 5562 - protein, 95 aa, Thermosynechococcus elongatus
ASVVPQERQQVTRKHYPNYKVIVMNDDFNTFRHVAACLMKYIPNMTSDRAWELTNQVHYKGQAIVWVGPQEQAELNHEQLLRAGLTMAPLEPEGS

SEQ ID NO: 5563 - protein, 23 aa, Thermosynechococcus elongatus
ASVVPQERQQVTRKHYPNYKVIV

SEQ ID NO: 5564 - protein, 95 aa, Thermosynechococcus elongatus
ASVVPQERQQVTRKHYPNYKVIVSNDDFNTFRHVAACLMKYIPNMTSDRAWELTNQVHYEGQAIVWVGPQEQAELYHEQLLRTGLTMAPLEPEGS

SEQ ID NO: 5565 - protein, 95 aa, Thermosynechococcus elongatus
ASVVPQERQQVTRKHYPNYKVIVSNDDFNTFRHVAACLMKYIPNMTSDRAWELTNQVHYEGQAIVWVGPQVQAELYHEQLLRAGLTMAPLEPGGS

SEQ ID NO: 5566 - protein, 95 aa, Thermosynechococcus elongatus
ASVVPQERQQVTRKHYPNYKVIVSNDDFNTFRHVAACLMKYIPNMTSDRAWELTNQVHYKGQAIVWVGPQEQAELNHEQLLRAGLTMAPLEPEGS

SEQ ID NO: 5567 - protein, 95 aa, Thermosynechococcus elongatus; identical to SEQ ID NO: 5

SEQ ID NO: 5568 - protein, 95 aa, Thermosynechococcus elongatus
ASVVPQERQQVTRKHYPNYKVIVLKDDFNTFQHVVACLKKYIPNMISDRAWELTNQVHYGGRAIVWVGPQEQAELYHEQLLRAGLTMAPLEPEGS

SEQ ID NO: 5569 - protein, 95 aa, Thermosynechococcus elongatus
ASVVPQERQQVTRKHYPNYKVIVLKDDFNTFRHVAAWLMKYIPNMTSDRAWELTNQVHYKGQAIVWVGPQEQAELNHEQLLRAGLTMAPLEPEGS

SEQ ID NO: 5570 - protein, 95 aa, Thermosynechococcus elongatus
ASVVPQERQQVTRKHYPNYKVIVLNDNFNTFRHVAACLMKYIPNMTSDRAWELTNQVHYEGQAIVWVGPQEQAELYHEQLLRAGLTMAPLEPEGS

SEQ ID NO: 5571 - protein, 95 aa, Thermosynechococcus elongatus
ASVVPQERQQVTRKHYPNYKVIVLNDHFNTFRHVAACLMKYIQNMTSDRAWELTNQVHYKGQAIVWVGPQEQAELNHEQLLRAGLTMAPLEPEGS

SEQ ID NO: 5572 - protein, 95 aa, Thermosynechococcus elongatus
ASVVPQERQQVTRKHYPNYKVIVLNDDINTFRHVAACLMKYIPNMTSDRAWELTNQVHYKGQAIVWVGPQEQAELNHEQLLRAGLTMAPLEPEGS

SEQ ID NO: 5573 - protein, 95 aa, Thermosynechococcus elongatus
ASVVPQERQQVTRKHYPNYKVIVLNDDINTFRHVAACLMKYIPNMTSDRAWELTNQVHYKGQAIVWVGPQEQAELYHEQLLRAGLTMAPLEPEGS

SEQ ID NO: 5574 - protein, 95 aa, Thermosynechococcus elongatus
ASVVPQERQQVTRKHYPNYKVIVLNDDLNTFQHVVACLKKYIPNMISDRAWELTNQVHYGGRAIVWVGPQEQAELYHEQLLRAGLTMAPLEPEGS

SEQ ID NO: 5575 - protein, 95 aa, Thermosynechococcus elongatus
ASVVPQERQQVTRKHYPNYKVIVLNDDYNTYRHVAACLMKNITNMTSDRAWELTKQVLYIGQAIVWVGPQEQAELYHEQLLRAGLTMAPLEPEGS

SEQ ID NO: 5576 - protein, 58 aa, Thermosynechococcus elongatus
ASVVPQERQQVTRKHYPNYKVIVLNDDYNTFRHVAACLMKNIPNMTSDRAWELTNQLH

SEQ ID NO: 5577 - protein, 95 aa, Thermosynechococcus elongatus
ASVVPQERQQVTRKHYPNYKVIVLNDDLNTFRHVAACLMKYIPNKTSDRAWELTNQVHYEGQAIVWVGPQEQAELYHEQLLRAGLTMAPLEPEGS

SEQ ID NO: 5578 - protein, 95 aa, Thermosynechococcus elongatus
ASVVPQERQQVTRKHYPNYKVIVLNDDFKTFRHVAACLMKYIPNMISDRAWELTNQGHYGGRAIVWVGPQEQAELYPEQLLRAGLTMAPLEPEGS

SEQ ID NO: 5579 - protein, 95 aa, Thermosynechococcus elongatus
ASVVPQERQQVTRKHYPNYKVIVLNDDFKTFRHVAACLMKYIPNMTSDRAWELTNQVHYKGQAIVWVGPQEQAELNHEQLLRAGLTMAPLEPEGS

SEQ ID NO: 5580 - protein, 95 aa, Thermosynechococcus elongatus
ASVVPQERQQVTRKHYPNYKVIVLNDDFNNFRHVAACLMKYIPNMTSDRAWELTNQVHYKGQAIVWVGPQEQAELNHEQLLRAGLTMAPLEPEGS

SEQ ID NO: 5581 - protein, 95 aa, Thermosynechococcus elongatus; identical to SEQ ID NO: 5

SEQ ID NO: 5582 - protein, 95 aa, Thermosynechococcus elongatus
ASVVPQERQQVTRKHYPNYKVIVLNDDFNTFRHVAACLMKYIPNMTSDRAWELTNQVHYEGQAIVWVGPQEQAELYHKQLLRAGLTMAPLEPEGS

SEQ ID NO: 5583 - protein, 95 aa, Thermosynechococcus elongatus; identical to SEQ ID NO: 15

SEQ ID NO: 5584 - protein, 95 aa, Thermosynechococcus elongatus; identical to SEQ ID NO: 5

SEQ ID NO: 5585 - protein, 95 aa, Thermosynechococcus elongatus
ASVVPQERQQVTRKHYPNYKVIVLNDDFNTIQHYVACLKKYIPNMISDRAWELTNQLHYGGRAIVWVGPQEQAELYHEQLLRAGLTMAPLEPEGS

SEQ ID NO: 5586 - protein, 95 aa, Thermosynechococcus elongatus
ASVVPQERQQVTRKHYPNYKVIVLNDDFNTIRHDAACLMKYIPNMTSDRAWELTNQVHYEGQAIVWVGPQVQAELYHEQLLRAGLTMAPLEPGGS

SEQ ID NO: 5587 - protein, 95 aa, Thermosynechococcus elongatus
ASVVPQERQQVTRKHYPNYKVIVLNDDFNTIRHVAACLMKYTPNMTSDRAWELTNQVHYKGQAIVWVGPQEQAELNHEQLLRAGLTMAPLEPEGS

SEQ ID NO: 5588 - protein, 95 aa, Thermosynechococcus elongatus
ASVVPQERQQVTRKHYPNYKVIVLNDDFNTIRHVAACLMKYIPNMTSDRAWELTNQVHYEGQAIVWVGPQEQAELYHEQLLRAGLTMASLEPEGS

SEQ ID NO: 5589 - protein, 95 aa, Thermosynechococcus elongatus
ASVVPQERQQVTRKHYPNYKVIVLNDDFNTIRHVAACLMKYIPNMTSDRAWELTNQVHYKGQAIVWVGPQEQAELNHEQLLRAGLTMAPLEPEGS

SEQ ID NO: 5590 - protein, 95 aa, Thermosynechococcus elongatus
ASVVPQERQQVTRKHYPNYKVIVLNDDFNTIRHVAACLMKYIPNMTSDRAWELTNQVHYKGQAIVWVGPQEQAEFYHEQLLRAGLTIAPLEPEGS

SEQ ID NO: 5591 - protein, 95 aa, Thermosynechococcus elongatus
ASVVPQERQQVTRKHYPNYKVIVLNDDFNTIRHVAACLMKYIPNMTSDRAWELTNQVHYTGQAIVWVGPQEQAELNHEQLLRAGLTMAPLEPEGS

SEQ ID NO: 5592 - protein, 95 aa, Thermosynechococcus elongatus
ASVVPQERQQVTRKHYPNYKVIVLNDDFNTIRHVAACLMKYIPNMTSDRAWELTNQVHYEGQAIVWVGPQVQAELYHEQLWRAGLTLAPLEPGGS

SEQ ID NO: 5593 - protein, 95 aa, Thermosynechococcus elongatus
ASVVPQERQQVTRKHYPNYKVIVLNDDFNTIRHVAACLMKYIPNMTSDRAWELTNQFHYGGRAIVWVGPQEQAVLYHEQLLRAGLTMAPLEPEGS

SEQ ID NO: 5594 - protein, 74 aa, Thermosynechococcus elongatus
ASVVPQERQQVTRKHYPNYKVIVLNDDFNTIRHVAACLMKYIPNMTSDRAWELTNHGHYEGQAIVWVGPQEQAE

SEQ ID NO: 5595 - protein, 52 aa, Thermosynechococcus elongatus
ASVVPQERQQVTRKHYPNYKVIVLNDDFNTIRHFAACLMKYIPNMTSDRAWE

SEQ ID NO: 5596 - protein, 36 aa, Thermosynechococcus elongatus
ASVVPQERQQVTRKHYPNYKVIVLNDDFNTIRRVAA

SEQ ID NO: 5597 - protein, 95 aa, Thermosynechococcus elongatus
ASVVPQERQQVTRKHYPNYKVIVLNDDFNTVQHVVACLKKYIPNMISDRAWELTNQVHYGGRAIVWVGPQEQAELYHEQLLRAGLTMAPLEPEGS

SEQ ID NO: 5598 - protein, 95 aa, Thermosynechococcus elongatus
ASVVPQERQQVTRKHYPNYKVIVLNDDFNTVRHVAACLMKYIPNMTSDRAWELTNQVHYEGQAIVWVGPQEQAELYHEQLLRAGLTMAPLEPGGS

SEQ ID NO: 5599 - protein, 95 aa, Thermosynechococcus elongatus
ASVVPQERQQVTRKHYPNYKVIVLNDDFNTVRHVAACLMKYIPNMTSDRAWELTNQVHYSGQAIVWVGPQEQAELNHEQLLRAGLTMAPLEPEGS

SEQ ID NO: 5600 - protein, 95 aa, Thermosynechococcus elongatus
ASVVPQERQQVTRKHYPNYKVIVLNDDFNTVRHVAACLMKYIPNMTSDRAWELTNQVHYKGQAIVWVGPQEQAELNHEQLLRAGLTMAPLEPEGS

SEQ ID NO: 5601 - protein, 95 aa, Thermosynechococcus elongatus
ASVVPQERQQVTRKHYPNYKVIVLNDDFNTYRHVAACLMKYIPNMTSDRAWELTNQVHYEGQAIVWVGPQEQAELYHEQLLRTGLTMAPLEPEGS

SEQ ID NO: 5602 - protein, 95 aa, Thermosynechococcus elongatus
ASVVPQERQQVTRKHYPNYKVIVLNDDFNTYRHVAACLMKYIPNMISDRAWELTNQVHYKCQAIVWVGPQEQAELNHEQLLRAGLTMAQLEPEGS

SEQ ID NO: 5603 - protein, 70 aa, Thermosynechococcus elongatus
ASVVPQERQQVTRKHYPNYKVIVLNDDFNTYRHVAACLMKYIPNMTSDRAWELTNHVHYIGLAIVWVCQQ

SEQ ID NO: 5604 - protein, 95 aa, Thermosynechococcus elongatus
ASVVPQERQQVTRKHYPNYKVIVLNDDFNTYRHVAACLMKYIANMTSDRAWELTNQVHYVGQAIVWVGPQEQAELYHDLLLRAGLTMAPLEPEGS

SEQ ID NO: 5605 - protein, 95 aa, Thermosynechococcus elongatus
ASVVPQERQQVTRKHYPNYKVIVLNDDFNTLQHVVACLKKYIPNMISDRAWELTNQVHYGGRAIVWVGPQEQAELYHEQLLRAGLTMAPLEPEGS

SEQ ID NO: 5606 - protein, 95 aa, Thermosynechococcus elongatus
ASVVPQERQQVTRKHYPNYKVIVLNDDFNTLRHVAACLMKYIPNKTSDRAWELTNQVHYEGQAIVWVGPQEQAELNHEQLLRAGLTMAPLEPEGS

SEQ ID NO: 5607 - protein, 95 aa, Thermosynechococcus elongatus
ASVVPQERQQVTRKHYPNYKVIVLNDDFNTLRHVAACLMKYIPNMTSDRAWELTNQVHYEGQAIVWVGPQEQAELYHEQLLRAGLTMAPLEPEGS

SEQ ID NO: 5608 - protein, 95 aa, Thermosynechococcus elongatus; identical to SEQ ID NO: 1708

SEQ ID NO: 5609 - protein, 95 aa, Thermosynechococcus elongatus
ASVVPQERQQVTRKHYPNYKVIVLNDDFNTFRHVAACLMKYITNMTSDRAWELTNQVQYKGQAIVWVGPQEQAELNHEQLLRAGLTMAPLEPEGS

SEQ ID NO: 5610 - protein, 95 aa, Thermosynechococcus elongatus; identical to SEQ ID NO: 15

SEQ ID NO: 5611 - protein, 59 aa, Thermosynechococcus elongatus
ASVVPQERQQVTRKHYPNYKVIVLNDDFNTFRHVAACLMKYIPNMISDRAWELTNQVHY

SEQ ID NO: 5612 - protein, 70 aa, Thermosynechococcus elongatus
ASVVPQERQQVTRKHYPNYKVIVLNDDFNTFRHVAACLMKYIPNMTSDRAWELTNQVHYKGQAIVWFGPQ

SEQ ID NO: 5613 - protein, 95 aa, Thermosynechococcus elongatus
ASVVPQERQQVTRKHYPNYKVIVLNDDFNTFRHVAACLMKYIPNMTSDRAWELTNQVHYGGRDIVWVCPQEQAELYHEQLLRSGLTMAPLEPEGS

SEQ ID NO: 5614 - protein, 95 aa, Thermosynechococcus elongatus
ASVVPQERQQVTRKHYPNYKVIVLNDDFNTFRHFAACLMKYIPNMTSDRAWELTNQVHYEGQAIFWVGPQEQAELYHEQLLRAGLTMAPLEPEGS

SEQ ID NO: 5615 - protein, 95 aa, Thermosynechococcus elongatus
ASVVPQERQQVTRKHYPNYKVIVLNDDFNTFQHIVACLKKYIPNMISDRAWELTNQVHYGGRAIVWVGPQEQAELYHEQLLRAGLTMAPLEPEGS

SEQ ID NO: 5616 - protein, 95 aa, Thermosynechococcus elongatus
ASVVPQERQQVTRKHYPNYKVIVLNDDFNTFQHDVACLKKYIPNMISDRAWELTNQVHYGGRAIVWVGPQEQAELYHEQLLRAGLTMAPLEPEGS

SEQ ID NO: 5617 - protein, 95 aa, Thermosynechococcus elongatus
ASVVPQERQQVTRKHYPNYKVIVLNDDFNTFQHGVACLKKYIPNMSSDRAWELTNQVHYGGRAIVWVGPQEQAELYHEQLLRAGLTMAPLEPEGS

SEQ ID NO: 5618 - protein, 95 aa, Thermosynechococcus elongatus
ASVVPQERQQVTRKHYPNYKVIVLNDDFNTFQHGVACLKKYIPNMISDRAWELTNQVHYGGRAIVWVGPQEQAELYHEQLLRAGLTMAPLEPEGS

SEQ ID NO: 5619 - protein, 95 aa, Thermosynechococcus elongatus
ASVVPQERQQVTRKHYPNYKVIVLNDDFNTFQHVIACLKKYIPNMISDRAWELTNQVHYGGRAIVWVGPQEQAELYHEQLLRAGLTMAPLEPEGS

SEQ ID NO: 5620 - protein, 95 aa, Thermosynechococcus elongatus
ASVVPQERQQVTRKHYPNYKVIVLNDDFNTFQHVDACLKKYIPKMISDRAWELTNQVHYGGRAIVWVGPQEQAELYHEQLLRAGLTMAPLEPEGS

SEQ ID NO: 5621 - protein, 95 aa, Thermosynechococcus elongatus
ASVVPQERQQVTRKHYPNYKVIVLNDDFNTFQHVDACLKKYIPNMNSDRAWELTNQVHYAGLAIVWVGPQEQAELYHEQLLRAGLTMAPLEPEGS

SEQ ID NO: 5622 - protein, 95 aa, Thermosynechococcus elongatus
ASVVPQERQQVTRKHYPNYKVIVLNDDFNTFQHVAACLKKYIPNMISDRAWELTNQVHYGGRAIVWVGPQEQAELYHEQLLRAGLTMAPLEPEGS

SEQ ID NO: 5623 - protein, 95 aa, Thermosynechococcus elongatus
ASVVPQERQQVTRKHYPNYKVIVLNDDFNTFQHVAACLMKYIPNMTSDRAWKLTNQVHYEGQAIVWVGPQEQAELYHEQLLRAGLTMAPLEPEGS

SEQ ID NO: 5624 - protein, 95 aa, Thermosynechococcus elongatus
ASVVPQERQQVTRKHYPNYKVIVLNDDFNTFQHVAACLMKYIPNMTSDRAWELTNKVHYEGQAIVWVGPQVQAELYHEQLLRAGLTMAPLEPGGS

SEQ ID NO: 5625 - protein, 95 aa, Thermosynechococcus elongatus
ASVVPQERQQVTRKHYPNYKVIVLNDDFNTFQHVAACLMKYIPNMTSDRAWELTNQVHYDGQAIVWVGPQEQAELYHEQLLRAGLTMAPLEPEGS

SEQ ID NO: 5626 - protein, 95 aa, Thermosynechococcus elongatus
ASVVPQERQQVTRKHYPNYKVIVLNDDFNTFQHVAACLMKYIPNMTSDRAWELTNQVHYEGQAIVRVGPQEQAELYHEQLLRAGLTMAPLEPGGS

SEQ ID NO: 5627 - protein, 95 aa, Thermosynechococcus elongatus
ASVVPQERQQVTRKHYPNYKVIVLNDDFNTFQHVAACLMKYIPNMTSDRAWELTNQVHYEGQAIVWVGPQVQAELYHEQLLRAGLTMAPLEPEGS

SEQ ID NO: 5628 - protein, 95 aa, Thermosynechococcus elongatus
ASVVPQERQQVTRKHYPNYKVIVLNDDFNTFQHVAACLMKYIPNMTSDRAWELTNQVHYEGLAIVWVGPQVQAELYHEQLLRAGLTMAPLEPGGS

SEQ ID NO: 5629 - protein, 95 aa, Thermosynechococcus elongatus
ASVVPQERQQVTRKHYPNYKVIVLNDDFNTFQHVAACLMKYIPNMTSDRAWELTNQVHYVGQAIVWVGPQEQAELYHEQLLRAGLTMAPLEPEGS

SEQ ID NO: 5630 - protein, 95 aa, Thermosynechococcus elongatus
ASVVPQERQQVTRKHYPNYKVIVLNDDFNTFQHVAACLMKYIPNMTSDRAWELTNQVHYVGQAIVWVGPQEQAELYHEQLLRAGLTMAPLEPGGS

SEQ ID NO: 5631 - protein, 95 aa, Thermosynechococcus elongatus
ASVVPQERQQVTRKHYPNYKVIVLNDDFNTFQHVAACLMKYIPNMTSDRAWELTNQVHYEGQATVWVGPQEQAELYHEQLLRAGLTMAPLEPEGS

SEQ ID NO: 5632 - protein, 95 aa, Thermosynechococcus elongatus; identical to SEQ ID NO: 5627

SEQ ID NO: 5633 - protein, 95 aa, Thermosynechococcus elongatus
ASVVPQERQQVTRKHYPNYKVIVLNDDFNTFQHVAACLMKYIPNMTSDRAWELTNLAHYEGQAIVWVGPQEQAELYHEQLLRAGLTMAPLEPEGS

SEQ ID NO: 5634 - protein, 95 aa, Thermosynechococcus elongatus
ASVVPQERQQVTRKHYPNYKVIVLNDDFNTFQHVAACLMKYIPNMTSDRAWELTNLVHYEGQAIVWVGPQEQAELHHEQLLRAGLTMAPLEPEGS

SEQ ID NO: 5635 - protein, 92 aa, Thermosynechococcus elongatus
ASVVPQERQQVTRKHYPNYKVIVLNDDFNTFQHVAACLMKYIPNMTSDRAWELTNLVHYEGQAIVWVGPQDQAELYHEQLLRAGLTMAPLEP

SEQ ID NO: 5636 - protein, 95 aa, Thermosynechococcus elongatus
ASVVPQERQQVTRKHYPNYKVIVLNDDFNTFQHVAACLMKYIPNMISDRAWELTNQVHYGGRAIVWVGPQEQAELYHEQLLRAGLTMAPLEPEGS

SEQ ID NO: 5637 - protein, 95 aa, Thermosynechococcus elongatus
ASVVPQERQQVTRKHYPNYKVIVLNDDFNTFQHVVARLKKYIPNMISDRAWELTNQVHYGGRAIVWVGPQEQAELYHEQLLRAGLTMAPLEPEGS

SEQ ID NO: 5638 - protein, 95 aa, Thermosynechococcus elongatus; identical to SEQ ID NO: 13

SEQ ID NO: 5639 - protein, 95 aa, Thermosynechococcus elongatus
ASVVPQERQQVTRKHYPNYKVIVLNDDFNTFQHVVACVKKYIPNMISDRAWELTNQVHYGGRAIVWVGPQEQAELYHEQLLRAGLTMAPLEPEGS

SEQ ID NO: 5640 - protein, 95 aa, Thermosynechococcus elongatus
ASVVPQERQQVTRKHYPNYKVIVLNDDFNTFQHVVACSKKYIPNMISDRAWELTNQVHYGGRAIVWVGPQEQAELYHEQLLRAGLTMAPLEPEGS

SEQ ID NO: 5641 - protein, 95 aa, Thermosynechococcus elongatus
ASVVPQERQQVTRKHYPNYKVIVLNDDFNTFQHVVACLKKNIPNMISDRAWELTNQVHYGGRAIVWVGPQEQAELYHELLLRAGLTMAPLEPEGS

SEQ ID NO: 5642 - protein, 95 aa, Thermosynechococcus elongatus
ASVVPQERQQVTRKHYPNYKVIVLNDDFNTFQHVVACLKKYIPNKTSDRAWELTNQVHYEGQAIVWVGPQEQAELYHEQLLRAGLTMAPLEPEGS

SEQ ID NO: 5643 - protein, 95 aa, Thermosynechococcus elongatus; identical to SEQ ID NO: 5642

SEQ ID NO: 5644 - protein, 95 aa, Thermosynechococcus elongatus
ASVVPQERQQVTRKHYPNYKVIVLNDDFNTFQHVVACLKKYIPNNTSDRAWELTNQVHYEGQAIVWVGPQEQAELYHEQLLRAGLTMAPLEPEGS

SEQ ID NO: 5645 - protein, 95 aa, Thermosynechococcus elongatus
ASVVPQERQQVTRKHYPNYKVIVLNDDFNTFQHVVACLKKYIPNMTSDRAWELTNQVHYEGQAIVWVGPQEQAELNHEQLLRAGLTMAPLEPEGS

SEQ ID NO: 5646 - protein, 95 aa, Thermosynechococcus elongatus
ASVVPQERQQVTRKHYPNYKVIVLNDDFNTFQHVVACLKKYIPNMTSDRAWELTNQVHYEGQAIVRVGPQEQAELYHKQLLRAGLTMAPLEPEGS

SEQ ID NO: 5647 - protein, 95 aa, Thermosynechococcus elongatus
ASVVPQERQQVTRKHYPNYKVIVLNDDFNTFQHVVACLKKYIPNMTSDRAWELTNQVHYEGQAIVWVGPREQAELYHEQLLRVGLTMAPLEPEGS

SEQ ID NO: 5648 - protein, 95 aa, Thermosynechococcus elongatus
ASVVPQERQQVTRKHYPNYKVIVLNDDFNTFQHVVACLKKYIPNMTSDRAWELTNQVHYGGRAIVWVGPQEQAELYHEQLLRAGLTMAPLEPEGS

SEQ ID NO: 5649 - protein, 95 aa, Thermosynechococcus elongatus
ASVVPQERQQVTRKHYPNYKVIVLNDDFNTFQHVVACLKKYIPNMTSDRAWELTNHVHYEGQAIVWVGPQEQAELYHEQLLRAGLTMAPLEPEGS

SEQ ID NO: 5650 - protein, 95 aa, Thermosynechococcus elongatus
ASVVPQERQQVTRKHYPNYKVIVLNDDFNTFQHVVACLKKYIPNMSSDRAWELTNQVHYVGLAIVWVGPQEQAELYHEQLLRAGLTMAPLEPEGS

SEQ ID NO: 5651 - protein, 95 aa, Thermosynechococcus elongatus
ASVVPQERQQVTRKHYPNYKVIVLNDDFNTFQHVVACLKKYIPNMISDRAWELTNQVHYGGRAIVWVGPQEQAELYHEQLLRAGLTIAPLEPEGS

SEQ ID NO: 5652 - protein, 81 aa, Thermosynechococcus elongatus
ASVVPQERQQVTRKHYPNYKVIVLNDDFNTFQHVVACLKKYIPNMISDRAWELTNQGHYGGRAIVWVGPLEQAVLFLVLLL

SEQ ID NO: 5653 - protein, 95 aa, Thermosynechococcus elongatus
ASVVPQERQQVTRKHYPNYKVIVLNDDFNTFQHVVACLKKYIPNMISDRAWELTNQVHYKGQAIVWVGPQEQSELNHEQLLRAGLTMAPLEPEGS

SEQ ID NO: 5654 - protein, 95 aa, Thermosynechococcus elongatus
ASVVPQERQQVTRKHYPNYKVIVLNDDFNTFQHVVACLKKYIPNMISDRAWELTNQVHYEGQAIVWVGPQEQAELNHEQLLRAGLTMAPLEPEGS

SEQ ID NO: 5655 - protein, 95 aa, Thermosynechococcus elongatus; identical to SEQ ID NO: 168

SEQ ID NO: 5656 - protein, 95 aa, Thermosynechococcus elongatus
ASVVPQERQQVTRKHYPNYKVIVLNDDFNTFQHVVACLKKYIPNMISDRAWELTNQVHYEGQAIVWVGPQEQAELYHEQLLRAGLTMAPLEPGGS

SEQ ID NO: 5657 - protein, 95 aa, Thermosynechococcus elongatus
ASVVPQERQQVTRKHYPNYKVIVLNDDFNTFQHVVACLKKYIPNMISDRAWELTNQVHYEGQAIVWVGPQEQAELYHEQLLRVGLTMAPLEPEGS

SEQ ID NO: 5658 - protein, 95 aa, Thermosynechococcus elongatus
ASVVPQERQQVTRKHYPNYKVIVLNDDFNTFQHVVACLKKYIPNMISDRAWELTNQVHYEGQAIVWVGPREQAELYHEQLLRAGLTMAPLEPEGS

SEQ ID NO: 5659 - protein, 95 aa, Thermosynechococcus elongatus
ASVVPQERQQVTRKHYPNYKVIVLNDDFNTFQHVVACLKKYIPNMISDRAWELTNQVHYEGQAIVWVGPREQAELYHEQLLRVGLTMAPLEPEGS

SEQ ID NO: 5660 - protein, 95 aa, Thermosynechococcus elongatus
ASVVPQERQQVTRKHYPNYKVIVLNDDFNTFQHVVACLKKYIPNMISDRAWELTNQVHYEGLAIVWVGPQEQAELYHEQLLRAGLTMAPLEPEGS

SEQ ID NO: 5661 - protein, 95 aa, Thermosynechococcus elongatus
ASVVPQERQQVTRKHYPNYKVIVLNDDFNTFQHVVACLKKYIPNMISDRAWELTNQVHYGARAIVWVGPQEQAELYHEQLLRAGLTRAPLEPVGS

SEQ ID NO: 5662 - protein, 95 aa, Thermosynechococcus elongatus
ASVVPQERQQVTRKHYPNYKVIVLNDDFNTFQHVVACLKKYIPNMISDRAWELTNQVHYGGRAIVWVGPQEQAESYHEQLLRAGLTMAPLEPEGS

SEQ ID NO: 5663 - protein, 95 aa, Thermosynechococcus elongatus
ASVVPQERQQVTRKHYPNYKVIVLNDDFNTFQHVVACLKKYIPNMISDRAWELTNQVHYGGQAIVWVGPQEQAELNHEQLLRAGLTMAPLEPEGS

SEQ ID NO: 5664 - protein, 95 aa, Thermosynechococcus elongatus; identical to SEQ ID NO: 13

SEQ ID NO: 5665 - protein, 95 aa, Thermosynechococcus elongatus; identical to SEQ ID NO: 2323

SEQ ID NO: 5666 - protein, 95 aa, Thermosynechococcus elongatus; identical to SEQ ID NO: 1701

SEQ ID NO: 5667 - protein, 95 aa, Thermosynechococcus elongatus
ASVVPQERQQVTRKHYPNYKVIVLNDDFNTFQHVVACLKKYIPNMISDRAWELTNQVHYGGRAIVRVGPQEQAELYHKQLLRAGLTMAPLEPEGS

SEQ ID NO: 5668 - protein, 95 aa, Thermosynechococcus elongatus; identical to SEQ ID NO: 13

SEQ ID NO: 5669 - protein, 95 aa, Thermosynechococcus elongatus
ASVVPQERQQVTRKHYPNYKVIVLNDDFNTFQHVVACLKKYIPNMISDRAWELTNQVHYGGRAIVWVGPQEQAELNHEQLLRAGLTRAPLEPEGS

SEQ ID NO: 5670 - protein, 95 aa, Thermosynechococcus elongatus; identical to SEQ ID NO: 2324

SEQ ID NO: 5671 - protein, 95 aa, Thermosynechococcus elongatus
ASVVPQERQQVTRKHYPNYKVIVLNDDFNTFQHVVACLKKYIPNMISDRAWELTNQVHYGGRAIVWVGPQEQAELYHKQLLRAGLTMAPLEPEGS

SEQ ID NO: 5672 - protein, 95 aa, Thermosynechococcus elongatus
ASVVPQERQQVTRKHYPNYKVIVLNDDFNTFQHVVACLKKYIPNMISDRAWELTNQVHYGGRAIVWVGPQEQAELYHEKLLRAGLTMAPLEPEGS

SEQ ID NO: 5673 - protein, 95 aa, Thermosynechococcus elongatus; identical to SEQ ID NO: 13

SEQ ID NO: 5674 - protein, 95 aa, Thermosynechococcus elongatus
ASVVPQERQQVTRKHYPNYKVIVLNDDFNTFQHVVACLKKYIPNMISDRAWELTNQVHYGGRAIVWVGPQEQAELYHEQLLRTGLTMAPLEPEGS

SEQ ID NO: 5675 - protein, 95 aa, Thermosynechococcus elongatus
ASVVPQERQQVTRKHYPNYKVIVLNDDFNTFQHVVACLKKYIPNMISDRAWELTNQVHYGGRAIVWVGPQEQAELYHEQLLRDGLTMAPLEPEGS

SEQ ID NO: 5676 - protein, 95 aa, Thermosynechococcus elongatus
ASVVPQERQQVTRKHYPNYKVIVLNDDFNTFQHVVACLKKYIPNMISDRAWELTNQVHYGGRAIVWVGPQEQAELYHEQLLRAGLTMDPLEPEGS

SEQ ID NO: 5677 - protein, 95 aa, Thermosynechococcus elongatus
ASVVPQERQQVTRKHYPNYKVIVLNDDFNTFQHVVACLKKYIPNMISDRAWELTNQVHYGGRAIVWVGPQEQAELYHEQLLRAGLTMATLEPEGS

SEQ ID NO: 5678 - protein, 95 aa, Thermosynechococcus elongatus
ASVVPQERQQVTRKHYPNYKVIVLNDDFNTFQHVVACLKKYIPNMISDRAWELTNQVHYGGRAIVWVGPQEQAELYHEQLLRAGLTMAPQEPEGS

SEQ ID NO: 5679 - protein, 95 aa, Thermosynechococcus elongatus; identical to SEQ ID NO: 13

SEQ ID NO: 5680 - protein, 95 aa, Thermosynechococcus elongatus; identical to SEQ ID NO: 13

SEQ ID NO: 5681 - protein, 95 aa, Thermosynechococcus elongatus
ASVVPQERQQVTRKHYPNYKVIVLNDDFNTFQHVVACLKKYIPNMISDRAWELTNQVHYGGRAIVWVGPQEQAELYHEQLLRAGLTLAPLEPEGS

SEQ ID NO: 5682 - protein, 95 aa, Thermosynechococcus elongatus
ASVVPQERQQVTRKHYPNYKVIVLNDDFNTFQHVVACLKKYIPNMISDRAWELTNQVHYGGRAIVWVGPQEQAELYHEQLLRAGLAMAPLEPEGS

SEQ ID NO: 5683 - protein, 95 aa, Thermosynechococcus elongatus
ASVVPQERQQVTRKHYPNYKVIVLNDDFNTFQHVVACLKKYIPNMISDRAWELTNQVHYGGRAIVWVGPQEQAELYHEQLLRACLTMAPLEPEGS

SEQ ID NO: 5684 - protein, 95 aa, Thermosynechococcus elongatus; identical to SEQ ID NO: 13

SEQ ID NO: 5685 - protein, 95 aa, Thermosynechococcus elongatus
ASVVPQERQQVTRKHYPNYKVIVLNDDFNTFQHVVACLKKYIPNMISDRAWELTNQVHYGGRAIVWVGPQEQAELYHEQLLIAGLTMAPLEPEGS

SEQ ID NO: 5686 - protein, 95 aa, Thermosynechococcus elongatus
ASVVPQERQQVTRKHYPNYKVIVLNDDFNTFQHVVACLKKYIPNMISDRAWELTNQVHYGGRAIVWVGPQEQAELYHEQFLRAGLTMAPLEPDGS

SEQ ID NO: 5687 - protein, 95 aa, Thermosynechococcus elongatus
ASVVPQERQQVTRKHYPNYKVIVLNDDFNTFQHVVACLKKYIPNMISDRAWELTNQVHYGGRAIVWVGPQEQAELYHDQLLRAGLTMAPLEPEGS

SEQ ID NO: 5688 - protein, 77 aa, Thermosynechococcus elongatus
ASVVPQERQQVTRKHYPNYKVIVLNDDFNTFQHVVACLKKYIPNMISDRAWELTNQVHYGGRAIVWVGPQEQAELYH

SEQ ID NO: 5689 - protein, 95 aa, Thermosynechococcus elongatus
ASVVPQERQQVTRKHYPNYKVIVLNDDFNTFQHVVACLKKYIPNMISDRAWELTNQVHYGGRAIVWVGPQEQAELYYEQLLRAGLTMAPLEPEGS

SEQ ID NO: 5690 - protein, 95 aa, Thermosynechococcus elongatus
ASVVPQERQQVTRKHYPNYKVIVLNDDFNTFQHVVACLKKYIPNMISDRAWELTNQVHYGGRAIVWVGPQDQAELYLEQLLRAGLTMAPLEPEGS

SEQ ID NO: 5691 - protein, 95 aa, Thermosynechococcus elongatus; identical to SEQ ID NO: 1704

SEQ ID NO: 5692 - protein, 70 aa, Thermosynechococcus elongatus
ASVVPQERQQVTRKHYPNYKVIVLNDDFNTFQHVVACLKKYIPNMISDRAWELTNQVHYGGRAIVWVGPQ

SEQ ID NO: 5693 - protein, 95 aa, Thermosynechococcus elongatus; identical to SEQ ID NO: 13

SEQ ID NO: 5694 - protein, 95 aa, Thermosynechococcus elongatus
ASVVPQERQQVTRKHYPNYKVIVLNDDFNTFQHVVACLKKYIPNMISDRAWELTNQVHYGGRAIVWVGPQEEAELYHEPLLRAGLTMAPLEPEGS

SEQ ID NO: 5695 - protein, 95 aa, Thermosynechococcus elongatus
ASVVPQERQQVTRKHYPNYKVIVLNDDFNTFQHVVACLKKYIPNMISDRAWELTNQVHYGGRAIVCVGPQEQAELYHEQLLRAGLTMAPLEPEGS

SEQ ID NO: 5696 - protein, 95 aa, Thermosynechococcus elongatus
ASVVPQERQQVTRKHYPNYKVIVLNDDFNTFQHVVACLKKYIPNMISDRAWELTNQVHYGGRAIVLVGPQEQAELYHEQLLRAGLTMAPLEPEGS

SEQ ID NO: 5697 - protein, 61 aa, Thermosynechococcus elongatus
ASVVPQERQQVTRKHYPNYKVIVLNDDFNTFQHVVACLKKYIPNMISDRAWELTNQVHYGG

SEQ ID NO: 5698 - protein, 95 aa, Thermosynechococcus elongatus
ASVVPQERQQVTRKHYPNYKVIVLNDDFNTFQHVVACLKKYIPNMISDRAWELTNQVHYGCRAIVWVGPQEQAELYHEQLFRAGLTMAPLEPEGS

SEQ ID NO: 5699 - protein, 95 aa, Thermosynechococcus elongatus
ASVVPQERQQVTRKHYPNYKVIVLNDDFNTFQHVVACLKKYIPNMISDRAWELTNQVHYVGQAIVWVGPQEQAELNHEQLLRAGLTMAPLEPEGS

SEQ ID NO: 5700 - protein, 95 aa, Thermosynechococcus elongatus
ASVVPQERQQVTRKHYPNYKVIVLNDDFNTFQHVVACLKKYIPNMISDRAWELTNQVHYVGRAIVWVGPQEQAELYHEHLLRDGLTMAPLEPEGS

SEQ ID NO: 5701 - protein, 95 aa, Thermosynechococcus elongatus; identical to SEQ ID NO: 168

SEQ ID NO: 5702 - protein, 95 aa, Thermosynechococcus elongatus; identical to SEQ ID NO: 13

SEQ ID NO: 5703 - protein, 75 aa, Thermosynechococcus elongatus
ASVVPQERQQVTRKHYPNYKVIVLNDDFNTFQHVVACLKKYIPNMISDRAWELTNQVLYGGRAIVWVGPQEQAEF

SEQ ID NO: 5704 - protein, 95 aa, Thermosynechococcus elongatus
ASVVPQERQQVTRKHYPNYKVIVLNDDFNTFQHVVACLKKYIPNMISDRAWELTNQVYYGGRAIVWVGPQEQAELYHEQLLRAGLTMAPLEPEGS

SEQ ID NO: 5705 - protein, 95 aa, Thermosynechococcus elongatus
ASVVPQERQQVTRKHYPNYKVIVLNDDFNTFQHVVACLKKYIPNMISDRAWELTNQFHYECQAIVWVGPQEQAELYHEQLLRAGLTLAPLEPEGS

SEQ ID NO: 5706 - protein, 95 aa, Thermosynechococcus elongatus
ASVVPQERQQVTRKHYPNYKVIVLNDDFNTFQHVVACLKKYIPNMISDRAWELTNHVHYGGRAIVWVGPQEQAELYHEQLLRAGLTMAPLEPEGS

SEQ ID NO: 5707 - protein, 95 aa, Thermosynechococcus elongatus; identical to SEQ ID NO: 5706

SEQ ID NO: 5708 - protein, 95 aa, Thermosynechococcus elongatus
ASVVPQERQQVTRKHYPNYKVIVLNDDFNTFQHVVACLKKYIPNMISDRAWDLTNQVHYGGRAIVWVGPQEQAELYHEQLLRAGLTMAPLEPEGS

SEQ ID NO: 5709 - protein, 95 aa, Thermosynechococcus elongatus
ASVVPQERQQVTRKHYPNYKVIVLNDDFNTFQHVVACLKKYIPNMTSDRAWELTNQVHYKGQAIVWVGPQEQAELNHEQLLRAGLTMAPLEPEGS

SEQ ID NO: 5710 - protein, 95 aa, Thermosynechococcus elongatus
ASVVPQERQQVTRKHYPNYKVIVLNDDFNTFQHVVACLKKYIPSMISDRAWELTNQVHYGGRAIVWVGPQEQAELYHEQLLRAGLTMAPLEPEGS

SEQ ID NO: 5711 - protein, 95 aa, Thermosynechococcus elongatus; identical to SEQ ID NO: 1222

SEQ ID NO: 5712 - protein, 95 aa, Thermosynechococcus elongatus; identical to SEQ ID NO: 13

SEQ ID NO: 5713 - protein, 95 aa, Thermosynechococcus elongatus
ASVVPQERQQVTRKHYPNYKVIVLNDDFNTFQHVVACLKKYLPNMISDRAWELTNQVHYGGRAIVWVGPQEPAELYHEHLWRAGLTMAPLEPEGS

SEQ ID NO: 5714 - protein, 95 aa, Thermosynechococcus elongatus
ASVVPQERQQVTRKHYPNYKVIVLNDDFNTFQHVVACLMKYIPNKTSDRAWELTNQVHYEGQAIVWVGPQEQAELYHEQLLRAGLTMAPLEPEGS

SEQ ID NO: 5715 - protein, 95 aa, Thermosynechococcus elongatus; identical to SEQ ID NO: 5714

SEQ ID NO: 5716 - protein, 95 aa, Thermosynechococcus elongatus
ASVVPQERQQVTRKHYPNYKVIVLNDDFNTFQHVVACLMKYIPNMTSDRAWELTNQVHYKGQAIVWVGPQEQAELNHEQLLRAGLTMAPLEPEGS

SEQ ID NO: 5717 - protein, 95 aa, Thermosynechococcus elongatus; identical to SEQ ID NO: 2326

SEQ ID NO: 5718 - protein, 95 aa, Thermosynechococcus elongatus; identical to SEQ ID NO: 764

SEQ ID NO: 5719 - protein, 95 aa, Thermosynechococcus elongatus
ASVVPQERQQVTRKHYPNYKVIVLNDDFNTFQHVVACLMKYIPNMTSDRAWELTNQVHYEGQAIVWVGPQVQAELYHEQLLRAGLTMAPLEPEGS

SEQ ID NO: 5720 - protein, 95 aa, Thermosynechococcus elongatus
ASVVPQERQQVTRKHYPNYKVIVLNDDFNTFQHVVACLMKYIPNMTSDRAWELTNQVHYEGQAIVWVGPQVQAELYHEQLLRAGLTMAPLEPGGS

SEQ ID NO: 5721 - protein, 95 aa, Thermosynechococcus elongatus; identical to SEQ ID NO: 5716

SEQ ID NO: 5722 - protein, 95 aa, Thermosynechococcus elongatus
ASVVPQERQQVTRKHYPNYKVIVLNDDFNTFQHVVACLMKFIPNMTSDRAWELTNQVHYKGQAIVWVGPQEQAELNHEQLLRAGLTMAPLEPEGS

SEQ ID NO: 5723 - protein, 95 aa, Thermosynechococcus elongatus
ASVVPQERQQVTRKHYPNYKVIVLNDDFNTFQHVVACFKKYIPNMISDRAWELTNQVHYGGRAIVWVGPQEQAELYHEQLLRAGLTMAPLEPEGS

SEQ ID NO: 5724 - protein, 95 aa, Thermosynechococcus elongatus
ASVVPQERQQVTRKHYPNYKVIVLNDDFNTFQHVVVCLKKYIPNMISDRAWELTNQVHYEGQAIVWVGPQEQAELYHEQLLRAGLTMAPLEPEGS

SEQ ID NO: 5725 - protein, 95 aa, Thermosynechococcus elongatus
ASVVPQERQQVTRKHYPNYKVIVLNDDFNTFQHVVVCLKKYIPNMISDRAWELTNQVHYGGRAIVWVGPQEQAELYHEQLLRAGLTMAPLEPEGS

SEQ ID NO: 5726 - protein, 95 aa, Thermosynechococcus elongatus
ASVVPQERQQVTRKHYPNYKVIVLNDDFNTFQLVVACLKKYIPNMISDRAWELTNQVHYGGRAIVWVGPQEQAELYHEQLLRAGLTMAPLEPEGS

SEQ ID NO: 5727 - protein, 95 aa, Thermosynechococcus elongatus
ASVVPQERQQVTRKHYPNYKVIVLNDDFNTFPHVAACLMKYIPNMTSDRAWELTNQVHYKGQAIVWVGPQEQAELYHEQLLRAGLTMAPLEPEGS

SEQ ID NO: 5728 - protein, 95 aa, Thermosynechococcus elongatus
ASVVPQERQQVTRKHYPNYKVIVLNDDFNTFRNVAACLMKYIPNMTSDRAWELTNQVHYEGQAIVWVGPQEQAELYHEQLLRAGLTMAPLEPEGS

SEQ ID NO: 5729 - protein, 36 aa, Thermosynechococcus elongatus
ASVVPQERQQVTRKHYPNYKVIVLNDDFNTFRHDAA

SEQ ID NO: 5730 - protein, 36 aa, Thermosynechococcus elongatus; identical to SEQ ID NO: 5729

SEQ ID NO: 5731 - protein, 95 aa, Thermosynechococcus elongatus
ASVVPQERQQVTRKHYPNYKVIVLNDDFNTFRHDAACLMKYIPNMTSDRAWELTNQVHYEGQAIVWVGPQEQAELYHEQLLRAGLTMAPLEPEGS

SEQ ID NO: 5732 - protein, 95 aa, Thermosynechococcus elongatus; identical to SEQ ID NO: 5731

SEQ ID NO: 5733 - protein, 93 aa, Thermosynechococcus elongatus
ASVVPQERQQVTRKHYPNYKVIVLNDDFNTFRHDAACLMKYIPNMTSDRAWELTNQVHFEGQAIVWVGPQEQAELYHELLLRAGLTMAPLEPE

SEQ ID NO: 5734 - protein, 95 aa, Thermosynechococcus elongatus
ASVVPQERQQVTRKHYPNYKVIVLNDDFNTFRHDAACLMKYIPNMTSDRAWELTNQVHYKGQAIVWVGPQEQAELYHEQLLRAGLTMAPLEPEGS

SEQ ID NO: 5735 - protein, 95 aa, Thermosynechococcus elongatus
ASVVPQERQQVTRKHYPNYKVIVLNDDFNTFRHDAACLMKYIPNMTSDRAWELTNQVHYKGLAIVWVGQQEQAELNHEQLLRAGLSMAPLEPEGS

SEQ ID NO: 5736 - protein, 95 aa, Thermosynechococcus elongatus
ASVVPQERQQVTRKHYPNYKVIVLNDDFNTFRHDAACLMKYIPNMTSDRAWELTNQVHYGGRAIVWVGPQVQAELYHEQLLRAGLTMAPLEPGGS

SEQ ID NO: 5737 - protein, 95 aa, Thermosynechococcus elongatus
ASVVPQERQQVTRKHYPNYKVIVLNDDFNTFRHGAACLMKYIPNMTSDRAWELTNQVHYEGQAIVWVGPQEQAELYHEQLLRAGLTMAPLEPEGS

SEQ ID NO: 5738 - protein, 95 aa, Thermosynechococcus elongatus
ASVVPQERQQVTRKHYPNYKVIVLNDDFNTFRHGAACLMKYIPNMTSDRAWELTNQVHYKGQAIVWVGPQEQAELNHEQLLRAGLTMAPLEPEGS

SEQ ID NO: 5739 - protein, 95 aa, Thermosynechococcus elongatus
ASVVPQERQQVTRKHYPNYKVIVLNDDFNTFRHVAACLMKYIPNMTSDRAWELTNQVHYEGQAIVWVGPQEQAELYHEQLLRTGLTMATLEPEGS

SEQ ID NO: 5740 - protein, 95 aa, Thermosynechococcus elongatus
ASVVPQERQQVTRKHYPNYKVIVLNDDFNTFRHVAACLMKYIPNMTSDRAWELTNQVHFKGQAIVWVGPQEQAELNHEQLLRAGLTMAPLEPEGS

SEQ ID NO: 5741 - protein, 95 aa, Thermosynechococcus elongatus; identical to SEQ ID NO: 34

SEQ ID NO: 5742 - protein, 95 aa, Thermosynechococcus elongatus
ASVVPQERQQVTRKHYPNYKVIVLNDDFNTFRHVAACLMKYIPNMTSDRALELTNQVHYEGQAIVWVGPPEQAELYHELLLRAGLTMAPLEQEGS

SEQ ID NO: 5743 - protein, 95 aa, Thermosynechococcus elongatus
ASVVPQERQQVTRKHYPNYKVIVLNDDFNTFRHVTACLMKYIPNMISDRAWELTNQVHYGGRAIVWVGPQEQAELYHEQLLRAGLTMAPLEPEGS

SEQ ID NO: 5744 - protein, 95 aa, Thermosynechococcus elongatus
ASVVPQERQQVTRKHYPNYKVIVLNDDFNTFRHVDACLMKYIPNMTSDRAWELTNQVHYEGQAIVWVGPQVQAELYHEQLLRAGLTMAPLEPGGS

SEQ ID NO: 5745 - protein, 95 aa, Thermosynechococcus elongatus
ASVVPQERQQVTRKHYPNYKVIVLNDDFNTFRHVDACLMKYIPNMTSDRAWELTNQVHYKGQAIVWVGPQEQAELNHEQLLRAGLTMAPLEPEGS

SEQ ID NO: 5746 - protein, 95 aa, Thermosynechococcus elongatus
ASVVPQERQQVTRKHYPNYKVIVLNDDFNTFRHVDACLMKYIPNMTSDRAWELTNQVHYKGQAIVCVGPQEQAELNHEQLLRAGLTMAPLEPEGS

SEQ ID NO: 5747 - protein, 95 aa, Thermosynechococcus elongatus; identical to SEQ ID NO: 25

SEQ ID NO: 5748 - protein, 95 aa, Thermosynechococcus elongatus; identical to SEQ ID NO: 47

SEQ ID NO: 5749 - protein, 95 aa, Thermosynechococcus elongatus
ASVVPQERQQVTRKHYPNYKVIVLNDDFNTFRHVATCLMKYIPNMTSDRAWELTNQVHYEGQAIVWVGPQEQAELYHEQLLRTGLTMAPLEPEGS

SEQ ID NO: 5750 - protein, 95 aa, Thermosynechococcus elongatus
ASVVPQERQQVTRKHYPNYKVIVLNDDFNTFRHVATCLMKYIPNMTSDRAWELTNQVHYEGQAIVWVGPQEQAELYHEQLLRAGLTMAPLEPEGS

SEQ ID NO: 5751 - protein, 95 aa, Thermosynechococcus elongatus
ASVVPQERQQVTRKHYPNYKVIVLNDDFNTFRHVATCLMKYIPNMTSDRAWELTNQVHYIGLAIVWVGPQEQAELNHEQLLRAGLTMAPLEPEGS

SEQ ID NO: 5752 - protein, 95 aa, Thermosynechococcus elongatus
ASVVPQERQQVTRKHYPNYKVIVLNDDFNTFRHVAESLMKYIPNMTSDRAWELTNQVHYEGQAIVWVGPQVQAELYHEQLLRAGLTMAPLEPGGS

SEQ ID NO: 5753 - protein, 95 aa, Thermosynechococcus elongatus
ASVVPQERQQVTRKHYPNYKVIVLNDDFNTFRHVAECLMKYIPNMTSDRAWELTNQVHYEGQAIVWVGPQEQAELYHEQLLRAGLTMAPLEPEGS

SEQ ID NO: 5754 - protein, 95 aa, Thermosynechococcus elongatus
ASVVPQERQQVTRKHYPNYKVIVLNDDFNTFRHVAECLMKYIPNMTSDRAWELTNQVHYKGQAIVWVGPQEQAELNHEQLLRAGLTMAPLEPEGS

SEQ ID NO: 5755 - protein, 95 aa, Thermosynechococcus elongatus
ASVVPQERQQVTRKHYPNYKVIVLNDDFNTFRHVAECLMKYIPNMTSDRAWELTNQVHYKGQAIVWVGPQEQAELNHEHLVRAGLTMAPLEPEGS

SEQ ID NO: 5756 - protein, 95 aa, Thermosynechococcus elongatus
ASVVPQERQQVTRKHYPNYKVIVLNDDFNTFRHVAASLMKYIPNMTSDRAWELTNQVHYKGQAIVWVGPQEQAELNHEQLLRAGLTMAPLEPEGS

SEQ ID NO: 5757 - protein, 95 aa, Thermosynechococcus elongatus
ASVVPQERQQVTRKHYPNYKVIVLNDDFNTFRHVAARLMKYIPNMISDRAWELTNQVHYGGRAIVWVGPQEQAELYHEQLLRAGLTMAPLEPEGS

SEQ ID NO: 5758 - protein, 95 aa, Thermosynechococcus elongatus
ASVVPQERQQVTRKHYPNYKVIVLNDDFNTFRHVAARLMKYIPNMTSDRAWELTNQVHYKGQAIVWVGPQEQAALNHEQLLRAGLTMAPLEPEGS

SEQ ID NO: 5759 - protein, 36 aa, Thermosynechococcus elongatus; identical to SEQ ID NO: 1057

SEQ ID NO: 5760 - protein, 36 aa, Thermosynechococcus elongatus; identical to SEQ ID NO: 1057

SEQ ID NO: 5761 - protein, 36 aa, Thermosynechococcus elongatus; identical to SEQ ID NO: 1057

SEQ ID NO: 5762 - protein, 36 aa, Thermosynechococcus elongatus; identical to SEQ ID NO: 1057

SEQ ID NO: 5763 - protein, 36 aa, Thermosynechococcus elongatus; identical to SEQ ID NO: 1057

SEQ ID NO: 5764 - protein, 95 aa, Thermosynechococcus elongatus
ASVVPQERQQVTRKHYPNYKVIVLNDDFNTFRHVAACKMKYIPNMTSDRAWELTNQVHYGGRAIVWVGPQEQAELYHEQLLRAGLTMAPLEPEGS

SEQ ID NO: 5765 - protein, 95 aa, Thermosynechococcus elongatus
ASVVPQERQQVTRKHYPNYKVIVLNDDFNTFRHVAACMMKYIPNMTSDRAWELTNQVHYEGQAIVWVGPQEQAELYHEQLLRAGLTMAPLEPEGS

SEQ ID NO: 5766 - protein, 95 aa, Thermosynechococcus elongatus
ASVVPQERQQVTRKHYPNYKVIVLNDDFNTFRHVAACMMKYIPNMISDRAWELTNQVHYGGRAIVWVGPQEQAELYHEQLLRAGLTMAPLEPEGS

SEQ ID NO: 5767 - protein, 95 aa, Thermosynechococcus elongatus
ASVVPQERQQVTRKHYPNYKVIVLNDDFNTFRHVAACMMKYIPNMTSDRAWELTNQVHYKGQAIVWVGPQEQAELNHEHLLRAGLTMAPLEPEGS

SEQ ID NO: 5768 - protein, 95 aa, Thermosynechococcus elongatus; identical to SEQ ID NO: 5

SEQ ID NO: 5769 - protein, 37 aa, Thermosynechococcus elongatus; identical to SEQ ID NO: 5280

SEQ ID NO: 5770 - protein, 37 aa, Thermosynechococcus elongatus; identical to SEQ ID NO: 5280

SEQ ID NO: 5771 - protein, 37 aa, Thermosynechococcus elongatus; identical to SEQ ID NO: 5280

SEQ ID NO: 5772 - protein, 95 aa, Thermosynechococcus elongatus
ASVVPQERQQVTRKHYPNYKVIVLNDDFNTFRHVAACSMKYIPNMTSDRAWELTNQVHYKGQAIVWVGPQEQAELNHEQLLRAGLTMAPLEPEGS

SEQ ID NO: 5773 - protein, 95 aa, Thermosynechococcus elongatus
ASVVPQERQQVTRKHYPNYKVIVLNDDFNTFRHVAACWMKYIPNKTSDRAWELTNQDHYAGQAIVWVGPQEQAELSHEQLLRAGLTMAPLEPEGS

SEQ ID NO: 5774 - protein, 95 aa, Thermosynechococcus elongatus
ASVVPQERQQVTRKHYPNYKVIVLNDDFNTFRHVAACWMKYIPNMTSDRAWELTNQVHYEGQAIVWVGPQVQAELYHEQLLRAGLTMAPLEPGGS

SEQ ID NO: 5775 - protein, 95 aa, Thermosynechococcus elongatus; identical to SEQ ID NO: 15

SEQ ID NO: 5776 - protein, 95 aa, Thermosynechococcus elongatus
ASVVPQERQQVTRKHYPNYKVIVLNDDFNTFRHVAACLKKYIQNMISDRAWELTNQVHYGGRAIVWVGPQEQAELYHEQLLRAGLTMAPLEPEGS

SEQ ID NO: 5777 - protein, 95 aa, Thermosynechococcus elongatus
ASVVPQERQQVTRKHYPNYKVIVLNDDFNTFRHVAACLKKYIPNMTSDRAWELTNQVHYEGQAIVWVGPQEQAELYHEQLLRAGLTMAPLEPEGS

SEQ ID NO: 5778 - protein, 95 aa, Thermosynechococcus elongatus
ASVVPQERQQVTRKHYPNYKVIVLNDDFNTFRHVAACLKKYIPNMTSDRAWELTNQVHYEGQAIVWVGPQEQAELYHEQLFRAGLTMAPLEPEGS

SEQ ID NO: 5779 - protein, 95 aa, Thermosynechococcus elongatus
ASVVPQERQQVTRKHYPNYKVIVLNDDFNTFRHVAACLKKYIPNMTSDRAWELTNQVHYEGQAIVWVGPQVQAELYHEQLLRAGLTMAPLEPGGS

SEQ ID NO: 5780 - protein, 95 aa, Thermosynechococcus elongatus
ASVVPQERQQVTRKHYPNYKVIVLNDDFNTFRHVAACLKKYIPNMISDRAWELTNQVHYGGRAIVWVGPQEQAELYHEQLLRAGLTRAPLEPEGS

SEQ ID NO: 5781 - protein, 95 aa, Thermosynechococcus elongatus; identical to SEQ ID NO: 78

SEQ ID NO: 5782 - protein, 95 aa, Thermosynechococcus elongatus
ASVVPQERQQVTRKHYPNYKVIVLNDDFNTFRHVAACLKKYIPNMISDRAWELTNQVHYGGRAIVWVGPQEQAELYHEQLLRAGLTMAPLEPGGS

SEQ ID NO: 5783 - protein, 95 aa, Thermosynechococcus elongatus; identical to SEQ ID NO: 5782

SEQ ID NO: 5784 - protein, 95 aa, Thermosynechococcus elongatus; identical to SEQ ID NO: 78

SEQ ID NO: 5785 - protein, 61 aa, Thermosynechococcus elongatus
ASVVPQERQQVTRKHYPNYKVIVLNDDFNTFRHVAACLKKYIPNMISDRAWELTNQVHYGG

SEQ ID NO: 5786 - protein, 95 aa, Thermosynechococcus elongatus
ASVVPQERQQVTRKHYPNYKVIVLNDDFNTFRHVAACLKKYFPNMTSDRAWELTNQVHYEGQAIVWVGPQVQAELYHEQLLRAGLTMAPLEPGGS

SEQ ID NO: 5787 - protein, 95 aa, Thermosynechococcus elongatus
ASVVPQERQQVTRKHYPNYKVIVLNDDFNTFRHVAACLTKYIPNKTSDRAWELTNQVHYEGQAIVWVGPQEQAELYHEQLLRAGLTMAPLEPEGS

SEQ ID NO: 5788 - protein, 95 aa, Thermosynechococcus elongatus
ASVVPQERQQVTRKHYPNYKVIVLNDDFNTFRHVAACLMKNIPNMTSDRAWELTNQVHYGGRAIVWVGPQEQAELYHEQLLRAGLTMAPLEPEGS

SEQ ID NO: 5789 - protein, 95 aa, Thermosynechococcus elongatus
ASVVPQERQQVTRKHYPNYKVIVLNDDFNTFRHVAACLMKHIPNKTSDRAWELTNQVHYEGQAIVWVGPQEQAELYHEQLLRAGLTMAPLEPEGS

SEQ ID NO: 5790 - protein, 40 aa, Thermosynechococcus elongatus; identical to SEQ ID NO: 1714

SEQ ID NO: 5791 - protein, 40 aa, Thermosynechococcus elongatus; identical to SEQ ID NO: 1714

SEQ ID NO: 5792 - protein, 40 aa, Thermosynechococcus elongatus; identical to SEQ ID NO: 1714

SEQ ID NO: 5793 - protein, 40 aa, Thermosynechococcus elongatus; identical to SEQ ID NO: 1714

SEQ ID NO: 5794 - protein, 95 aa, Thermosynechococcus elongatus
ASVVPQERQQVTRKHYPNYKVIVLNDDFNTFRHVAACLMKYNPNMTSDRAWELTNQVHYEGQAIVWVGPQEQAELYHEQLLRAGLTMAPLEPVGS

SEQ ID NO: 5795 - protein, 95 aa, Thermosynechococcus elongatus
ASVVPQERQQVTRKHYPNYKVIVLNDDFNTFRHVAACLMKYNPNMTSDRAWELTNQVHYEGQAIVWVGPQEQAELYHEQLLRAGLTMAPFEPEGS

SEQ ID NO: 5796 - protein, 95 aa, Thermosynechococcus elongatus
ASVVPQERQQVTRKHYPNYKVIVLNDDFNTFRHVAACLMKYNPNMTSDRAWELTNQVHYEGQAIVWVGPQEQAELYHEQLLRAGLTMALLEPEGS

SEQ ID NO: 5797 - protein, 95 aa, Thermosynechococcus elongatus
ASVVPQERQQVTRKHYPNYKVIVLNDDFNTFRHVAACLMKYNPNMTSDRAWELTNQVHYEGQAIVWVGPQEQAELYHEQLLRAGLTMVPLEPEGS

SEQ ID NO: 5798 - protein, 95 aa, Thermosynechococcus elongatus
ASVVPQERQQVTRKHYPNYKVIVLNDDFNTFRHVAACLMKYNPNMTSDRAWELTNQVHYEGQAIVWVGPQEQAELYHEQLLRSGLTMAPLEPEGS

SEQ ID NO: 5799 - protein, 77 aa, Thermosynechococcus elongatus
ASVVPQERQQVTRKHYPNYKVIVLNDDFNTFRHVAACLMKYNPNMTSDRAWELTNQVHYEGQAIVWVGPQEQAELYH

SEQ ID NO: 5800 - protein, 95 aa, Thermosynechococcus elongatus
ASVVPQERQQVTRKHYPNYKVIVLNDDFNTFRHVAACLMKYNPNMTSDRAWELTNQVHYEGQAIVWVGPQVQAELYHEQLLRAGLTMAPLEPGGS

SEQ ID NO: 5801 - protein, 95 aa, Thermosynechococcus elongatus
ASVVPQERQQVTRKHYPNYKVIVLNDDFNTFRHVAACLMKYNPNMTSDRAWELTNQVHYEGQAIVWVGPQVQAELSHEQLLRAGLTMAPLEPEGS

SEQ ID NO: 5802 - protein, 95 aa, Thermosynechococcus elongatus
ASVVPQERQQVTRKHYPNYKVIVLNDDFNTFRHVAACLMKYNPNMTSDRAWELTNQVHYEGQAIVWVCPQEQAELYHEQLLRAGLTMAPLEPEGS

SEQ ID NO: 5803 - protein, 95 aa, Thermosynechococcus elongatus; identical to SEQ ID NO: 91

SEQ ID NO: 5804 - protein, 95 aa, Thermosynechococcus elongatus
ASVVPQERQQVTRKHYPNYKVIVLNDDFNTFRHVAACLMKYNPNMTSDRAWELTNQVLFEGQAIVWVGPQEQAELYHEQLLRAGLTMAPLEPEGS

SEQ ID NO: 5805 - protein, 95 aa, Thermosynechococcus elongatus
ASVVPQERQQVTRKHYPNYKVIVLNDDFNTFRHVAACLMKYNPNMISDRAWELTNQVHYGGRAIVWVGPQEQAELYHEQLLRAGLTMAPLEPEGS

SEQ ID NO: 5806 - protein, 95 aa, Thermosynechococcus elongatus; identical to SEQ ID NO: 29

SEQ ID NO: 5807 - protein, 95 aa, Thermosynechococcus elongatus
ASVVPQERQQVTRKHYPNYKVIVLNDDFNTFRHVAACLMKYIPNMTSDRAWELTNQGHYKGQAIVWVGPQEQAELNHEQLWRAGLTMATLEPEGS

SEQ ID NO: 5808 - protein, 95 aa, Thermosynechococcus elongatus
ASVVPQERQQVTRKHYPNYKVIVLNDDFNTFRHVAACLMKYITNKTSDRAWELTNQVHYEGQAIVWVGPQEQAELYHEQLLRAGLTRAPLEPEGS

SEQ ID NO: 5809 - protein, 95 aa, Thermosynechococcus elongatus
ASVVPQERQQVTRKHYPNYKVIVLNDDFNTFRHVAACLMKYITNMTSDRAWELTNQVHYEGQAIVWVGPQEQAELYHEQLLRAGLTMAPLEPEGS

SEQ ID NO: 5810 - protein, 95 aa, Thermosynechococcus elongatus
ASVVPQERQQVTRKHYPNYKVIVLNDDFNTFRHVAACLMKYITNMISDRAWELTNQVHYGGRAIVWVGPQEQAELYHEQLLRAGLTMAPLEPEGS

SEQ ID NO: 5811 - protein, 95 aa, Thermosynechococcus elongatus
ASVVPQERQQVTRKHYPNYKVIVLNDDFNTFRHVAACLMKYITNMTSDRAWELTNQVHYKGQAIVWVGPQEQAELNHEQLLRAGLTMAPLEPEGS

SEQ ID NO: 5812 - protein, 95 aa, Thermosynechococcus elongatus
ASVVPQERQQVTRKHYPNYKVIVLNDDFNTFRHVAACLMKYITNMTSDRAWELTNQVHYIGQAIVWVGPQEQAELYNVQLLRAGLTMAPLEAEGS

SEQ ID NO: 5813 - protein, 95 aa, Thermosynechococcus elongatus
ASVVPQERQQVTRKHYPNYKVIVLNDDFNTFRHVAACLMKYIQNKTSDRAWELTNQVHYEGQAIVWVGPQEQAELYHEQLLRAGLTMAPLEPEGS

SEQ ID NO: 5814 - protein, 90 aa, Thermosynechococcus elongatus
ASVVPQERQQVTRKHYPNYKVIVLNDDFNTFRHVAACLMKYIQNKTSDRAWELTNQVHYEGQAIVWVGPQEQAELYHEQLLRAGLTMAPL

SEQ ID NO: 5815 - protein, 95 aa, Thermosynechococcus elongatus
ASVVPQERQQVTRKHYPNYKVIVLNDDFNTFRHVAACLMKYIQNMTSDRAWELTNQVHYEGQAIVWVGPQEQAELYHEQLLRTGLTMAPLEPEGS

SEQ ID NO: 5816 - protein, 95 aa, Thermosynechococcus elongatus; identical to SEQ ID NO: 767

SEQ ID NO: 5817 - protein, 95 aa, Thermosynechococcus elongatus
ASVVPQERQQVTRKHYPNYKVIVLNDDFNTFRHVAACLMKYIQNMTSDRAWELTNQVHYGGRAIVWVGPQEQAELYHEQLLRAGLTMAPLEPEGS

SEQ ID NO: 5818 - protein, 95 aa, Thermosynechococcus elongatus
ASVVPQERQQVTRKHYPNYKVIVLNDDFNTFRHVAACLMKYIPKKTSDRAWELTNQVHYEGQAIVWVGPQEQAELYHEQLLRAGLTMAPLEPEGS

SEQ ID NO: 5819 - protein, 90 aa, Thermosynechococcus elongatus
ASVVPQERQQVTRKHYPNYKVIVLNDDFNTFRHVAACLMKYIPNKTSDRAWELTNQVHYEGQSIVWVGPQEQAELYHEQLLRAGLTIATL

SEQ ID NO: 5820 - protein, 95 aa, Thermosynechococcus elongatus
ASVVPQERQQVTRKHYPNYKVIVLNDDFNTFRHVAACLMKYIPNKTSDRAWELTNKVHYEGQAIVWVGPQEQAELYHEQLLRAGLTMAPLEPEGS

SEQ ID NO: 5821 - protein, 95 aa, Thermosynechococcus elongatus
ASVVPQERQQVTRKHYPNYKVIVLNDDFNTFRHVAACLMKYIPNKTSDRAWELTNQVNYEGQAIVWVGPQEQAELYHEQLLRAGLTMAPLEPEGS

SEQ ID NO: 5822 - protein, 95 aa, Thermosynechococcus elongatus; identical to SEQ ID NO: 1656

SEQ ID NO: 5823 - protein, 95 aa, Thermosynechococcus elongatus
ASVVPQERQQVTRKHYPNYKVIVLNDDFNTFRHVAACLMKYIPNKTSDRAWELTNQVHYEGQAIVWVGPQEQAELYHEHLLRAGLTMAPLEPEGS

SEQ ID NO: 5824 - protein, 95 aa, Thermosynechococcus elongatus
ASVVPQERQQVTRKHYPNYKVIVLNDDFNTFRHVAACLMKYIPNKTSDRAWELTNQVHYEGQAIVWVGPQEQAELNHEQLLRAGLTMAPLEPEGS

SEQ ID NO: 5825 - protein, 95 aa, Thermosynechococcus elongatus
ASVVPQERQQVTRKHYPNYKVIVLNDDFNTFRHVAACLMKYIPNKTSDRAWELTNQVHYEGQAIVRVGPQEQAELYHKQLLRAGLTMAPLEPEGS

SEQ ID NO: 5826 - protein, 95 aa, Thermosynechococcus elongatus
ASVVPQERQQVTRKHYPNYKVIVLNDDFNTFRHVAACLMKYIPNKTSDRAWELTNQVHYEGQAIVWVGQQEQAELYHEQLLRAGLTMAPLEPEGS

SEQ ID NO: 5827 - protein, 95 aa, Thermosynechococcus elongatus; identical to SEQ ID NO: 5824

SEQ ID NO: 5828 - protein, 95 aa, Thermosynechococcus elongatus
ASVVPQERQQVTRKHYPNYKVIVLNDDFNTFRHVAACLMKYIPNKTSDRAWELTNQVHYEGQAIVWVGPQEQAELYHEQLLRAGLTRAPLEPEGS

SEQ ID NO: 5829 - protein, 95 aa, Thermosynechococcus elongatus; identical to SEQ ID NO: 34

SEQ ID NO: 5830 - protein, 95 aa, Thermosynechococcus elongatus
ASVVPQERQQVTRKHYPNYKVIVLNDDFNTFRHVAACLMKYIPNKTSDRAWELTNQVHYEGQAIVWVGPQEQAELYHEQLLRAGLTMSPLEPEGS

SEQ ID NO: 5831 - protein, 95 aa, Thermosynechococcus elongatus
ASVVPQERQQVTRKHYPNYKVIVLNDDFNTFRHVAACLMKYIPNKTSDRAWELTNQVHYEGQAIVWVGPQEQAELYHEQLLRAGLTIAPLEPEGS

SEQ ID NO: 5832 - protein, 95 aa, Thermosynechococcus elongatus; identical to SEQ ID NO: 5831

SEQ ID NO: 5833 - protein, 95 aa, Thermosynechococcus elongatus
ASVVPQERQQVTRKHYPNYKVIVLNDDFNTFRHVAACLMKYIPNKTSDRAWELTNQVHYEGQAIVWVGPQEQAVLYHEQLLRAGLTMAPLEPEGS

SEQ ID NO: 5834 - protein, 95 aa, Thermosynechococcus elongatus
ASVVPQERQQVTRKHYPNYKVIVLNDDFNTFRHVAACLMKYIPNKTSDRAWELTNQVHYEGQAIVWVGPQAQAELYHEQLLRAGLTMAPLEPEGS

SEQ ID NO: 5835 - protein, 95 aa, Thermosynechococcus elongatus
ASVVPQERQQVTRKHYPNYKVIVLNDDFNTFRHVAACLMKYIPNKTSDRAWELTNQVHYEGQAIVWVCPQEQAELYHEQLLRAGLTMAPLEPEGS

SEQ ID NO: 5836 - protein, 95 aa, Thermosynechococcus elongatus
ASVVPQERQQVTRKHYPNYKVIVLNDDFNTFRHVAACLMKYIPNKTSDRAWELTNQVHYEGRAIVWVGPQEQAELYHEQLLRAGLTMAPLEPEGS

SEQ ID NO: 5837 - protein, 95 aa, Thermosynechococcus elongatus
ASVVPQERQQVTRKHYPNYKVIVLNDDFNTFRHVAACLMKYIPNKTSDRAWELTNQVHYGGRAIVWVGPQEQAELYHEQLLRAGLTMAPLEPGGS

SEQ ID NO: 5838 - protein, 95 aa, Thermosynechococcus elongatus; identical to SEQ ID NO: 587

SEQ ID NO: 5839 - protein, 95 aa, Thermosynechococcus elongatus
ASVVPQERQQVTRKHYPNYKVIVLNDDFNTFRHVAACLMKYIPNKTSDRAWELTNLVHYEGQAIVWVGPQEQAELYHEQLLRAGLTMAPLEPEGS

SEQ ID NO: 5840 - protein, 95 aa, Thermosynechococcus elongatus; identical to SEQ ID NO: 5

SEQ ID NO: 5841 - protein, 95 aa, Thermosynechococcus elongatus
ASVVPQERQQVTRKHYPNYKVIVLNDDFNTFRHVAACLMKYIPNMTSDRAWELTNQVHYGGRAIVWVGPQEQAESYHEQLLRAGLTMAPLEPEGS

SEQ ID NO: 5842 - protein, 95 aa, Thermosynechococcus elongatus
ASVVPQERQQVTRKHYPNYKVIVLNDDFNTFRHVAACLMKYIPNMTSDRAWELTNQVHYEGKAIVWVGPQEQAELYHEQLLRAGLTMAPLEPEGS

SEQ ID NO: 5843 - protein, 95 aa, Thermosynechococcus elongatus; identical to SEQ ID NO: 15

SEQ ID NO: 5844 - protein, 95 aa, Thermosynechococcus elongatus; identical to SEQ ID NO: 1727

SEQ ID NO: 5845 - protein, 95 aa, Thermosynechococcus elongatus
ASVVPQERQQVTRKHYPNYKVIVLNDDFNTFRHVAACLMKYIPNMTSDRDWELTNQVHYEGQAIVWVGPQEQAELYHEQLLRTGLTMAPLEPEGS

SEQ ID NO: 5846 - protein, 95 aa, Thermosynechococcus elongatus
ASVVPQERQQVTRKHYPNYKVIVLNDDFNTFRHVAACLMKYIPNMTSDRDWELTNQVHYEGQAIVWVGPQEQAELYHEQLLRAGLTMAPLEPEGS

SEQ ID NO: 5847 - protein, 50 aa, Thermosynechococcus elongatus
ASVVPQERQQVTRKHYPNYKVIVLNDDFNTFRHVAACLMKYIPNMTSDRA

SEQ ID NO: 5848 - protein, 95 aa, Thermosynechococcus elongatus
ASVVPQERQQVTRKHYPNYKVIVLNDDFNTFRHVAACLMKYIPNMTSDRASELTNQVHYEGQAIVWVGPQEQAELYHEQLLRTGLTMAPLEPEGS

SEQ ID NO: 5849 - protein, 95 aa, Thermosynechococcus elongatus
ASVVPQERQQVTRKHYPNYKVIVLNDDFNTFRHVAACLMKYIPNMTSDRAWELNNQVHYEGQAIVWVGPQEQAELYHKQLLRAGLTMAPLEPEGS

SEQ ID NO: 5850 - protein, 95 aa, Thermosynechococcus elongatus
ASVVPQERQQVTRKHYPNYKVIVLNDDFNTFRHVAACLMKYIPNMTSDRAWELTNKVHYEGQAIVWVGPQEQAELYHEQLLRAGLTMAPLEPEGS

SEQ ID NO: 5851 - protein, 95 aa, Thermosynechococcus elongatus
ASVVPQERQQVTRKHYPNYKVIVLNDDFNTFRHVAACLMKYIPNMTSDRAWELTNQAHYEGQAIVWVGPQEQAELYHEQLLRAGLTMAPLEPEGS

SEQ ID NO: 5852 - protein, 93 aa, Thermosynechococcus elongatus
ASVVPQERQQVTRKHYPNYKVIVLNDDFNTFRHVAACLMKYIPNMTSDRAWELTNQVNFVGLAIVWVGPQVLAVFYIEQLLRAGLTLAPLDPE

SEQ ID NO: 5853 - protein, 58 aa, Thermosynechococcus elongatus
ASVVPQERQQVTRKHYPNYKVIVLNDDFNTFRHVAACLMKYIPNMTSDRAWELTNQVH

SEQ ID NO: 5854 - protein, 95 aa, Thermosynechococcus elongatus; identical to SEQ ID NO: 1070

SEQ ID NO: 5855 - protein, 95 aa, Thermosynechococcus elongatus; identical to SEQ ID NO: 5

SEQ ID NO: 5856 - protein, 95 aa, Thermosynechococcus elongatus; identical to SEQ ID NO: 1753

SEQ ID NO: 5857 - protein, 95 aa, Thermosynechococcus elongatus; identical to SEQ ID NO: 55

SEQ ID NO: 5858 - protein, 95 aa, Thermosynechococcus elongatus; identical to SEQ ID NO: 55

SEQ ID NO: 5859 - protein, 95 aa, Thermosynechococcus elongatus
ASVVPQERQQVTRKHYPNYKVIVLNDDFNTFRHVAACLMKYIPNMTSDRAWELTNQVHYEGKAIVWVGPQEQAELYHEQLLRTGLTMAPLEPEGS

SEQ ID NO: 5860 - protein, 95 aa, Thermosynechococcus elongatus; identical to SEQ ID NO: 32

SEQ ID NO: 5861 - protein, 95 aa, Thermosynechococcus elongatus; identical to SEQ ID NO: 15

SEQ ID NO: 5862 - protein, 95 aa, Thermosynechococcus elongatus
ASVVPQERQQVTRKHYPNYKVIVLNDDFNTFRHVAACLMKYIPNMTSDRAWELTNQVHYEGQAIVWVGPQEQAELYHEHLLRAGLTMAPLEPEGS

SEQ ID NO: 5863 - protein, 80 aa, Thermosynechococcus elongatus
ASVVPQERQQVTRKHYPNYKVIVLNDDFNTFRHVAACLMKYIPNMTSDRAWELTNQVHYEGQAIVGLVHENKLNYTTNNC

SEQ ID NO: 5864 - protein, 95 aa, Thermosynechococcus elongatus
ASVVPQERQQVTRKHYPNYKVIVLNDDFNTFRHVAACLMKYIPNMTSDRAWELTNQVHYEGQAIVLVGPQEQAELNHEQLLRAGLTMAPLEPEGS

SEQ ID NO: 5865 - protein, 95 aa, Thermosynechococcus elongatus; identical to SEQ ID NO: 419

SEQ ID NO: 5866 - protein, 95 aa, Thermosynechococcus elongatus; identical to SEQ ID NO: 1770

SEQ ID NO: 5867 - protein, 95 aa, Thermosynechococcus elongatus
ASVVPQERQQVTRKHYPNYKVIVLNDDFNTFRHVAACLMKYIPNMTSDRAWELTNQVHYEGQAIVWAGPQVQAELYHEQLLRAGLTMAPLEPEGS

SEQ ID NO: 5868 - protein, 95 aa, Thermosynechococcus elongatus; identical to SEQ ID NO: 32

SEQ ID NO: 5869 - protein, 95 aa, Thermosynechococcus elongatus; identical to SEQ ID NO: 15

SEQ ID NO: 5870 - protein, 95 aa, Thermosynechococcus elongatus; identical to SEQ ID NO: 87

SEQ ID NO: 5871 - protein, 95 aa, Thermosynechococcus elongatus
ASVVPQERQQVTRKHYPNYKVIVLNDDFNTFRHVAACLMKYIPNMTSDRAWELTNQVHYEGQAIVWVGPQEQAKLYHEQLLRTGLTMAPLEPEGS

SEQ ID NO: 5872 - protein, 95 aa, Thermosynechococcus elongatus; identical to SEQ ID NO: 250

SEQ ID NO: 5873 - protein, 75 aa, Thermosynechococcus elongatus
ASVVPQERQQVTRKHYPNYKVIVLNDDFNTFRHVAACLMKYIPNMTSDRAWELTNQVHYEGQAIVWVGPQEQAEL

SEQ ID NO: 5874 - protein, 95 aa, Thermosynechococcus elongatus; identical to SEQ ID NO: 5582

SEQ ID NO: 5875 - protein, 95 aa, Thermosynechococcus elongatus; identical to SEQ ID NO: 15

SEQ ID NO: 5876 - protein, 95 aa, Thermosynechococcus elongatus
ASVVPQERQQVTRKHYPNYKVIVLNDDFNTFRHVAACLMKYIPNMTSDRAWELTNQVHYEGQAIVWVGPQEQAELYHEQLVRAGLTMAPLEPEGS

SEQ ID NO: 5877 - protein, 80 aa, Thermosynechococcus elongatus
ASVVPQERQQVTRKHYPNYKVIVLNDDFNTFRHVAACLMKYIPNMTSDRAWELTNQVHYEGQAIVWVGPQEQAELYHEQL

SEQ ID NO: 5878 - protein, 95 aa, Thermosynechococcus elongatus
ASVVPQERQQVTRKHYPNYKVIVLNDDFNTFRHVAACLMKYIPNMTSDRAWELTNQVHYEGQAIVWVGPQEQAELYHEQLWRTGLTMAPLEPEGS

SEQ ID NO: 5879 - protein, 94 aa, Thermosynechococcus elongatus
ASVVPQERQQVTRKHYPNYKVIVLNDDFNTFRHVAACLMKYIPNMTSDRAWELTNQVHYEGQAIVWVGPQEQAELYHEQLLSWFDYGSIGTRRI

SEQ ID NO: 5880 - protein, 95 aa, Thermosynechococcus elongatus; identical to SEQ ID NO: 5739

SEQ ID NO: 5881 - protein, 90 aa, Thermosynechococcus elongatus
ASVVPQERQQVTRKHYPNYKVIVLNDDFNTFRHVAACLMKYIPNMTSDRAWELTNQVHYEGQAIVWVGPQEQAELYHEQLLRTGLTMAPL

SEQ ID NO: 5882 - protein, 95 aa, Thermosynechococcus elongatus
ASVVPQERQQVTRKHYPNYKVIVLNDDFNTFRHVAACLMKYIPNMTSDRAWELTNQVHYEGQAIVWVGPQEQAELYHEQLLRTGFTMAPLEPEGS

SEQ ID NO: 5883 - protein, 95 aa, Thermosynechococcus elongatus
ASVVPQERQQVTRKHYPNYKVIVLNDDFNTFRHVAACLMKYIPNMTSDRAWELTNQVHYEGQAIVWVGPQEQAELYHEQLLRTCLTMAPLEPEGS

SEQ ID NO: 5884 - protein, 95 aa, Thermosynechococcus elongatus; identical to SEQ ID NO: 15

SEQ ID NO: 5885 - protein, 95 aa, Thermosynechococcus elongatus; identical to SEQ ID NO: 15

SEQ ID NO: 5886 - protein, 95 aa, Thermosynechococcus elongatus
ASVVPQERQQVTRKHYPNYKVIVLNDDFNTFRHVAACLMKYIPNMTSDRAWELTNQVHYEGQAIVWVGPQEQAELYHEQLLRAGLNMAPLEPEGS

SEQ ID NO: 5887 - protein, 95 aa, Thermosynechococcus elongatus; identical to SEQ ID NO: 5306

SEQ ID NO: 5888 - protein, 95 aa, Thermosynechococcus elongatus
ASVVPQERQQVTRKHYPNYKVIVLNDDFNTFRHVAACLMKYIPNMTSDRAWELTNQVHYEGQAIVWVGPQEQAELYHEQLLRAGLTMAPLEPQGS

SEQ ID NO: 5889 - protein, 94 aa, Thermosynechococcus elongatus
ASVVPQERQQVTRKHYPNYKVIVLNDDFNTFRHVAACLMKYIPNMTSDRAWELTNQVHYEGQAIVWVGPQEQAELYHEQLLRAGLTMAPLEPKD

SEQ ID NO: 5890 - protein, 92 aa, Thermosynechococcus elongatus
ASVVPQERQQVTRKHYPNYKVIVLNDDFNTFRHVAACLMKYIPNMTSDRAWELTNQVHYEGQAIVWVGPQEQAELYHEQLLRAGLTMAPLEP

SEQ ID NO: 5891 - protein, 90 aa, Thermosynechococcus elongatus
ASVVPQERQQVTRKHYPNYKVIVLNDDFNTFRHVAACLMKYIPNMTSDRAWELTNQVHYEGQAIVWVGPQEQAELYHEQLLRAGLTMAPL

SEQ ID NO: 5892 - protein, 95 aa, Thermosynechococcus elongatus
ASVVPQERQQVTRKHYPNYKVIVLNDDFNTFRHVAACLMKYIPNMTSDRAWELTNQVHYEGQAIVWVGPQEQAELYHEQLLRAGLTMASLEAEGS

SEQ ID NO: 5893 - protein, 95 aa, Thermosynechococcus elongatus
ASVVPQERQQVTRKHYPNYKVIVLNDDFNTFRHVAACLMKYIPNMTSDRAWELTNQVHYEGQAIVWVGPQEQAELYHEQLLRAGLTLAPLEQEGS

SEQ ID NO: 5894 - protein, 95 aa, Thermosynechococcus elongatus
ASVVPQERQQVTRKHYPNYKVIVLNDDFNTFRHVAACLMKYIPNMTSDRAWELTNQVHYEGQAIVWVGPQEQAELYHEQLLRAGLAMAPLEPEGS

SEQ ID NO: 5895 - protein, 95 aa, Thermosynechococcus elongatus
ASVVPQERQQVTRKHYPNYKVIVLNDDFNTFRHVAACLMKYIPNMTSDRAWELTNQVHYEGQAIVWVGPQEQAELYHEQLLRSGLTMDPLEPEGS

SEQ ID NO: 5896 - protein, 95 aa, Thermosynechococcus elongatus
ASVVPQERQQVTRKHYPNYKVIVLNDDFNTFRHVAACLMKYIPNMTSDRAWELTNQVHYEGQAIVWVGPQEQAELYHEQLLRSGLTMAPLEPEGS

SEQ ID NO: 5897 - protein, 95 aa, Thermosynechococcus elongatus
ASVVPQERQQVTRKHYPNYKVIVLNDDFNTFRHVAACLMKYIPNMTSDRAWELTNQVHYEGQAIVWVGPQEQAELYHEQLLIAGLTMAPLEPEGS

SEQ ID NO: 5898 - protein, 95 aa, Thermosynechococcus elongatus
ASVVPQERQQVTRKHYPNYKVIVLNDDFNTFRHVAACLMKYIPNMTSDRAWELTNQVHYEGQAIVWVGPQEQAELYHDHLLRAGLTMAPLEPEGS

SEQ ID NO: 5899 - protein, 95 aa, Thermosynechococcus elongatus; identical to SEQ ID NO: 1730

SEQ ID NO: 5900 - protein, 95 aa, Thermosynechococcus elongatus
ASVVPQERQQVTRKHYPNYKVIVLNDDFNTFRHVAACLMKYIPNMTSDRAWELTNQVHYEGQAIVWVGPQEQAELYPEQLLRTGLTMAPLEPEGS

SEQ ID NO: 5901 - protein, 75 aa, Thermosynechococcus elongatus; identical to SEQ ID NO: 5873

SEQ ID NO: 5902 - protein, 95 aa, Thermosynechococcus elongatus; identical to SEQ ID NO: 29

SEQ ID NO: 5903 - protein, 95 aa, Thermosynechococcus elongatus
ASVVPQERQQVTRKHYPNYKVIVLNDDFNTFRHVAACLMKYIPNMTSDRAWELTNQVHYEGQAIVWVGPQEQAVLYHEQLLRAGLTMAPLEPEGS

SEQ ID NO: 5904 - protein, 73 aa, Thermosynechococcus elongatus
ASVVPQERQQVTRKHYPNYKVIVLNDDFNTFRHVAACLMKYIPNMTSDRAWELTNQVHYEGQAIVWVGPQEQA

SEQ ID NO: 5905 - protein, 95 aa, Thermosynechococcus elongatus
ASVVPQERQQVTRKHYPNYKVIVLNDDFNTFRHVAACLMKYIPNMTSDRAWELTNQVHYEGQAIVWVGPQEQGELYHEQLLRAGLTRAPLEPEGS

SEQ ID NO: 5906 - protein, 95 aa, Thermosynechococcus elongatus
ASVVPQERQQVTRKHYPNYKVIVLNDDFNTFRHVAACLMKYIPNMTSDRAWELTNQVHYEGQAIVWVGPQAQAELNHEQLLRAGLTMAPLEPEGS

SEQ ID NO: 5907 - protein, 95 aa, Thermosynechococcus elongatus
ASVVPQERQQVTRKHYPNYKVIVLNDDFNTFRHVAACLMKYIPNMTSDRAWELTNQVHYEGQAIVWVGPQAQAELYHEQLLRTGLTMAPLEPEGS

SEQ ID NO: 5908 - protein, 95 aa, Thermosynechococcus elongatus
ASVVPQERQQVTRKHYPNYKVIVLNDDFNTFRHVAACLMKYIPNMTSDRAWELTNQVHYEGQAIVWVGPQAQAELYHEQLLRAGLTMAPLEPEGS

SEQ ID NO: 5909 - protein, 95 aa, Thermosynechococcus elongatus
ASVVPQERQQVTRKHYPNYKVIVLNDDFNTFRHVAACLMKYIPNMTSDRAWELTNQVHYEGQAIVWVGPQVQAELYHKQLLRAGLTMAPLEPGGS

SEQ ID NO: 5910 - protein, 95 aa, Thermosynechococcus elongatus
ASVVPQERQQVTRKHYPNYKVIVLNDDFNTFRHVAACLMKYIPNMTSDRAWELTNQVHYEGQAIVWVGPQVQAELYHEQLLRAGLTRAPLEPGGS

SEQ ID NO: 5911 - protein, 95 aa, Thermosynechococcus elongatus
ASVVPQERQQVTRKHYPNYKVIVLNDDFNTFRHVAACLMKYIPNMTSDRAWELTNQVHYEGQAIVWVGPQVQAELYHEQLLRAGLTMAQLEPGGS

SEQ ID NO: 5912 - protein, 95 aa, Thermosynechococcus elongatus
ASVVPQERQQVTRKHYPNYKVIVLNDDFNTFRHVAACLMKYIPNMTSDRAWELTNQVHYEGQAIVWVGPQVQAELYHEQLLRAGLTMAPLEPKGS

SEQ ID NO: 5913 - protein, 95 aa, Thermosynechococcus elongatus
ASVVPQERQQVTRKHYPNYKVIVLNDDFNTFRHVAACLMKYIPNMTSDRAWELTNQVHYEGQAIVWVGPQVQAELYHEQLLRAGLTMAPLDPGGS

SEQ ID NO: 5914 - protein, 95 aa, Thermosynechococcus elongatus
ASVVPQERQQVTRKHYPNYKVIVLNDDFNTFRHVAACLMKYIPNMTSDRAWELTNQVHYEGQAIVWVGPQVQAELYHEQLLGAGLTMAPLEPGGS

SEQ ID NO: 5915 - protein, 95 aa, Thermosynechococcus elongatus
ASVVPQERQQVTRKHYPNYKVIVLNDDFNTFRHVAACLMKYIPNMTSDRAWELTNQVHYEGQAIVWVGPQVQAELYHEQLFRAGLTMAPLEPGGS

SEQ ID NO: 5916 - protein, 95 aa, Thermosynechococcus elongatus
ASVVPQERQQVTRKHYPNYKVIVLNDDFNTFRHVAACLMKYIPNMTSDRAWELTNQVHYEGQAIVWVGPQVQAELYHEHLLRAGLTMAPLEPGGS

SEQ ID NO: 5917 - protein, 95 aa, Thermosynechococcus elongatus; identical to SEQ ID NO: 25

SEQ ID NO: 5918 - protein, 95 aa, Thermosynechococcus elongatus
ASVVPQERQQVTRKHYPNYKVIVLNDDFNTFRHVAACLMKYIPNMTSDRAWELTNQVHYEGQAIVWVGPQVLAELYHEQLLRAGLTMAPLEPGGS

SEQ ID NO: 5919 - protein, 95 aa, Thermosynechococcus elongatus; identical to SEQ ID NO: 25

SEQ ID NO: 5920 - protein, 95 aa, Thermosynechococcus elongatus
ASVVPQERQQVTRKHYPNYKVIVLNDDFNTFRHVAACLMKYIPNMTSDRAWELTNQVHYEGQAIVWVGPREQAELNHEQLLRAGLTMAPLEPEGS

SEQ ID NO: 5921 - protein, 95 aa, Thermosynechococcus elongatus
ASVVPQERQQVTRKHYPNYKVIVLNDDFNTFRHVAACLMKYIPNMTSDRAWELTNQVHYEGQAIVWVGPREQAELYQEQLLRVGLTMAPLEPEGS

SEQ ID NO: 5922 - protein, 95 aa, Thermosynechococcus elongatus
ASVVPQERQQVTRKHYPNYKVIVLNDDFNTFRHVAACLMKYIPNMTSDRAWELTNQVHYEGQAIVWVGPREQAELYHEQLLRTGLTMAPLEPEGS

SEQ ID NO: 5923 - protein, 95 aa, Thermosynechococcus elongatus
ASVVPQERQQVTRKHYPNYKVIVLNDDFNTFRHVAACLMKYIPNMTSDRAWELTNQVHYEGQAIVWVGPREQAELYHEQLLRAGLTRAPLEPEGS

SEQ ID NO: 5924 - protein, 95 aa, Thermosynechococcus elongatus
ASVVPQERQQVTRKHYPNYKVIVLNDDFNTFRHVAACLMKYIPNMTSDRAWELTNQVHYEGQAIVWVGPREQAELYHEQLLRAGLTMAPLEPKGS

SEQ ID NO: 5925 - protein, 95 aa, Thermosynechococcus elongatus
ASVVPQERQQVTRKHYPNYKVIVLNDDFNTFRHVAACLMKYIPNMTSDRAWELTNQVHYEGQAIVWVGPREQAELYHEQLLRVGLTMATLEPEGS

SEQ ID NO: 5926 - protein, 95 aa, Thermosynechococcus elongatus
ASVVPQERQQVTRKHYPNYKVIVLNDDFNTFRHVAACLMKYIPNMTSDRAWELTNQVHYEGQAIVWVGPREQAELYHEQLLRVGLTMAPLETEGS

SEQ ID NO: 5927 - protein, 95 aa, Thermosynechococcus elongatus; identical to SEQ ID NO: 32

SEQ ID NO: 5928 - protein, 95 aa, Thermosynechococcus elongatus
ASVVPQERQQVTRKHYPNYKVIVLNDDFNTFRHVAACLMKYIPNMTSDRAWELTNQVHYEGQAIVWVGPREQAELYHEQLLRVVLTMAPLEPEGS

SEQ ID NO: 5929 - protein, 95 aa, Thermosynechococcus elongatus
ASVVPQERQQVTRKHYPNYKVIVLNDDFNTFRHVAACLMKYIPNMTSDRAWELTNQVHYEGQAIVWVGPREQAELYHEQLLSVGLTMAPLEPEGS

SEQ ID NO: 5930 - protein, 95 aa, Thermosynechococcus elongatus
ASVVPQERQQVTRKHYPNYKVIVLNDDFNTFRHVAACLMKYIPNMTSDRAWELTNQVHYEGQAIVWVGPREQAELYHEQFLRVGLTMAPLERDGS

SEQ ID NO: 5931 - protein, 95 aa, Thermosynechococcus elongatus
ASVVPQERQQVTRKHYPNYKVIVLNDDFNTFRHVAACLMKYIPNMTSDRAWELTNQVHYEGQAIVWVGPREQAELYPEQLLRVGLTMAPLEPEGS

SEQ ID NO: 5932 - protein, 92 aa, Thermosynechococcus elongatus
ASVVPQERQQVTRKHYPNYKVIVLNDDFNTFRHVAACLMKYIPNMTSDRAWELTNQVHYEGQAIVWVGPRDQAELYHEQLLRVGLTMAPLEP

SEQ ID NO: 5933 - protein, 95 aa, Thermosynechococcus elongatus
ASVVPQERQQVTRKHYPNYKVIVLNDDFNTFRHVAACLMKYIPNMTSDRAWELTNQVHYEGQAIVWVGLQVQAELYHEQLLRAGLTMAPLEPEGS

SEQ ID NO: 5934 - protein, 95 aa, Thermosynechococcus elongatus
ASVVPQERQQVTRKHYPNYKVIVLNDDFNTFRHVAACLMKYIPNMTSDRAWELTNQVHYEGQAIVCVGPQEQAELYHEQLLRTGLTMAPLEPEGS

SEQ ID NO: 5935 - protein, 95 aa, Thermosynechococcus elongatus
ASVVPQERQQVTRKHYPNYKVIVLNDDFNTFRHVAACLMKYIPNMTSDRAWELTNQVHYEGQAIVCVGPQEQAELYHEQLLRAGLTMAPLEPEGS

SEQ ID NO: 5936 - protein, 95 aa, Thermosynechococcus elongatus
ASVVPQERQQVTRKHYPNYKVIVLNDDFNTFRHVAACLMKYIPNMTSDRAWELTNQVHYEGQAIVCVGPQVQAELYLEQLLRAGLSMAPLEPVGS

SEQ ID NO: 5937 - protein, 95 aa, Thermosynechococcus elongatus
ASVVPQERQQVTRKHYPNYKVIVLNDDFNTFRHVAACLMKYIPNMTSDRAWELTNQVHYEGQSIVWVGPQEQAELYHEQLLRAGLTMAPLEPEGS

SEQ ID NO: 5938 - protein, 95 aa, Thermosynechococcus elongatus; identical to SEQ ID NO: 29

SEQ ID NO: 5939 - protein, 81 aa, Thermosynechococcus elongatus
ASVVPQERQQVTRKHYPNYKVIVLNDDFNTFRHVAACLMKYIPNMTSDRAWELTNQVHYEGHAIVWVGPQEQAELYHEQLL

SEQ ID NO: 5940 - protein, 95 aa, Thermosynechococcus elongatus
ASVVPQERQQVTRKHYPNYKVIVLNDDFNTFRHVAACLMKYIPNMTSDRAWELTNQVHYEGLAIVWVGPQEQAELYHEQLLRTGLTMAPLEPEGS

SEQ ID NO: 5941 - protein, 95 aa, Thermosynechococcus elongatus
ASVVPQERQQVTRKHYPNYKVIVLNDDFNTFRHVAACLMKYIPNMTSDRAWELTNQVHYEGLAIVWVGPQEQAELYHEQLLRAGLTMAPLEPEGS

SEQ ID NO: 5942 - protein, 61 aa, Thermosynechococcus elongatus
ASVVPQERQQVTRKHYPNYKVIVLNDDFNTFRHVAACLMKYIPNMTSDRAWELTNQVHYEG

SEQ ID NO: 5943 - protein, 95 aa, Thermosynechococcus elongatus
ASVVPQERQQVTRKHYPNYKVIVLNDDFNTFRHVAACLMKYIPNMTSDRAWELTNQVHYEVQAIVWVGPQEQAELYHEQLLRTGLTMAPLEPGGS

SEQ ID NO: 5944 - protein, 95 aa, Thermosynechococcus elongatus
ASVVPQERQQVTRKHYPNYKVIVLNDDFNTFRHVAACLMKYIPNMTSDRAWELTNQVHYECQAIVWVGPQVQAELYHEQLLRAGLTMAPLEPGGS

SEQ ID NO: 5945 - protein, 95 aa, Thermosynechococcus elongatus
ASVVPQERQQVTRKHYPNYKVIVLNDDFNTFRHVAACLMKYIPNMTSDRAWELTNQVHYDGQAIVWVGPQEQAELYHEQLLRAGLTMAPLEPEGS

SEQ ID NO: 5946 - protein, 95 aa, Thermosynechococcus elongatus
ASVVPQERQQVTRKHYPNYKVIVLNDDFNTFRHVAACLMKYIPNMTSDRAWELTNQVHYDGQAIVWVGPQVQAELYHEQLLRACLTRAPLEPGGS

SEQ ID NO: 5947 - protein, 95 aa, Thermosynechococcus elongatus; identical to SEQ ID NO: 5945

SEQ ID NO: 5948 - protein, 95 aa, Thermosynechococcus elongatus
ASVVPQERQQVTRKHYPNYKVIVLNDDFNTFRHVAACLMKYIPNMTSDRAWELTNQVHYAGQAIVWVGPQEQAELYHEQLLRTGLTMASLEPEGS

SEQ ID NO: 5949 - protein, 95 aa, Thermosynechococcus elongatus; identical to SEQ ID NO: 1084

SEQ ID NO: 5950 - protein, 95 aa, Thermosynechococcus elongatus; identical to SEQ ID NO: 778

SEQ ID NO: 5951 - protein, 95 aa, Thermosynechococcus elongatus; identical to SEQ ID NO: 1774

SEQ ID NO: 5952 - protein, 95 aa, Thermosynechococcus elongatus
ASVVPQERQQVTRKHYPNYKVIVLNDDFNTFRHVAACLMKYIPNMTSDRAWELTNQVHYGGLAIVWVGPQEQAELYHEQLLRAGLTMAPLEREGS

SEQ ID NO: 5953 - protein, 95 aa, Thermosynechococcus elongatus
ASVVPQERQQVTRKHYPNYKVIVLNDDFNTFRHVAACLMKYIPNMTSDRAWELTNQVHYVGQAIVWVGPQVQAELYHEQLLRAGLTMAPLEPGGS

SEQ ID NO: 5954 - protein, 95 aa, Thermosynechococcus elongatus
ASVVPQERQQVTRKHYPNYKVIVLNDDFNTFRHVAACLMKYIPNMTSDRAWELTNQVHYVGQAIVWVAPQEQAELYHEQLLRTGLTMAPLEPEGS

SEQ ID NO: 5955 - protein, 95 aa, Thermosynechococcus elongatus
ASVVPQERQQVTRKHYPNYKVIVLNDDFNTFRHVAACLMKYIPNMTSDRAWELTNQVHYVGQAIVWVGPQEQAELYHEQLLRAGLTMAPLEPGGS

SEQ ID NO: 5956 - protein, 95 aa, Thermosynechococcus elongatus
ASVVPQERQQVTRKHYPNYKVIVLNDDFNTFRHVAACLMKYIPNMTSDRAWELTNQVHYVGQAIVWVGPQERAELYHEQLLRAGLTRAPLEPEGS

SEQ ID NO: 5957 - protein, 95 aa, Thermosynechococcus elongatus
ASVVPQERQQVTRKHYPNYKVIVLNDDFNTFRHVAACLMKYIPNMTSDRAWELTNQVHYVGQAIVWVGPQVQAELYHEQLLRAGLTMAPLEPEGS

SEQ ID NO: 5958 - protein, 59 aa, Thermosynechococcus elongatus
ASVVPQERQQVTRKHYPNYKVIVLNDDFNTFRHVAACLMKYIPNMTSDRAWELTNQVHY

SEQ ID NO: 5959 - protein, 59 aa, Thermosynechococcus elongatus; identical to SEQ ID NO: 5958

SEQ ID NO: 5960 - protein, 95 aa, Thermosynechococcus elongatus
ASVVPQERQQVTRKHYPNYKVIVLNDDFNTFRHVAACLMKYIPNMTSDRAWELTNQVHFEGQAIVWVGPQKQAELYHEQLLRAGLTMAPLEPKGS

SEQ ID NO: 5961 - protein, 95 aa, Thermosynechococcus elongatus
ASVVPQERQQVTRKHYPNYKVIVLNDDFNTFRHVAACLMKYIPNMTSDRAWELTNQVLYEGQAIVWVGPQEQAELYHEQLLRAGLTMAPLEPEGS

SEQ ID NO: 5962 - protein, 95 aa, Thermosynechococcus elongatus
ASVVPQERQQVTRKHYPNYKVIVLNDDFNTFRHVAACLMKYIPNMTSDRAWELTNQVLYVGQAIVWFGPQVQAELYHELLLRAGLTMAPLEPGGS

SEQ ID NO: 5963 - protein, 95 aa, Thermosynechococcus elongatus
ASVVPQERQQVTRKHYPNYKVIVLNDDFNTFRHVAACLMKYIPNMTSDRAWELANQVHYEGQAIVWVGPQEQAELYHEQLLRAGLTMAPLEPEGS

SEQ ID NO: 5964 - protein, 95 aa, Thermosynechococcus elongatus
ASVVPQERQQVTRKHYPNYKVIVLNDDFNTFRHVAACLMKYIPNMTSDRAWDLTNQVHYEGQAIVWVGPQEQAELYHEQLLRAGLTMAPLEPGGS

SEQ ID NO: 5965 - protein, 95 aa, Thermosynechococcus elongatus
ASVVPQERQQVTRKHYPNYKVIVLNDDFNTFRHVAACLMKYIPNMTSDRACELTNQVHYEGQAIVWVGPQEQAELYHEQLLRAGLTMAPLEPGGS

SEQ ID NO: 5966 - protein, 95 aa, Thermosynechococcus elongatus
ASVVPQERQQVTRKHYPNYKVIVLNDDFNTFRHVAACLMKYIPNMTSDRACELTNQVHYEGQAIVWVCPQEQAELYHEQLLRAGLTMAPLEPEGS

SEQ ID NO: 5967 - protein, 95 aa, Thermosynechococcus elongatus
ASVVPQERQQVTRKHYPNYKVIVLNDDFNTFRHVAACLMKYIPNMTSDRALELTNQVHYEGQAIVWVGPREQAELYHEQLLRVGLTMAPLEPEGS

SEQ ID NO: 5968 - protein, 95 aa, Thermosynechococcus elongatus
ASVVPQERQQVTRKHYPNYKVIVLNDDFNTFRHVAACLMKYIPNMTSYRAWELTNQVHYEGQAIVWVGPQEQAELYHEQLLRAGLTMAPLEPEGS

SEQ ID NO: 5969 - protein, 95 aa, Thermosynechococcus elongatus; identical to SEQ ID NO: 5968

SEQ ID NO: 5970 - protein, 95 aa, Thermosynechococcus elongatus
ASVVPQERQQVTRKHYPNYKVIVLNDDFNTFRHVAACLMKYIPNMTSYRAWELTNQVLYEGQAIVWVGPREQAELYHEQLLRVGLTMAPLEPEGS

SEQ ID NO: 5971 - protein, 95 aa, Thermosynechococcus elongatus
ASVVPQERQQVTRKHYPNYKVIVLNDDFNTFRHVAACLMKYIPNMISDRAWELTNQVHYKGQAIVWVGPQEQAELNHEQLLRAGLTMAPLEPEGS

SEQ ID NO: 5972 - protein, 95 aa, Thermosynechococcus elongatus
ASVVPQERQQVTRKHYPNYKVIVLNDDFNTFRHVAACLMKYIPNMISDRAWELTNQVHYEGQAIVWVGPQEQAELNHEQLLRAGLTMAPLEPEGS

SEQ ID NO: 5973 - protein, 61 aa, Thermosynechococcus elongatus
ASVVPQERQQVTRKHYPNYKVIVLNDDFNTFRHVAACLMKYIPNMISDRAWELTNQVHYEG

SEQ ID NO: 5974 - protein, 95 aa, Thermosynechococcus elongatus
ASVVPQERQQVTRKHYPNYKVIVLNDDFNTFRHVAACLMKYIPNMISDRAWELTNQVHYGGQAIVWVGPQEQAELYHEQLLRAGLTMAPLEPEGS

SEQ ID NO: 5975 - protein, 95 aa, Thermosynechococcus elongatus; identical to SEQ ID NO: 5974

SEQ ID NO: 5976 - protein, 95 aa, Thermosynechococcus elongatus; identical to SEQ ID NO: 85

SEQ ID NO: 5977 - protein, 95 aa, Thermosynechococcus elongatus
ASVVPQERQQVTRKHYPNYKVIVLNDDFNTFRHVAACLMKYIPNMISDRAWELTNQVHYGGRAIVWVGPQEQAELYHEQLLRAGLTMAPLEPKGS

SEQ ID NO: 5978 - protein, 95 aa, Thermosynechococcus elongatus
ASVVPQERQQVTRKHYPNYKVIVLNDDFNTFRHVAACLMKYIPNMISDRAWELTNQVHYGGRAIVWVGPQEQAELYHEQLLRAGLTMAPLEPGGS

SEQ ID NO: 5979 - protein, 95 aa, Thermosynechococcus elongatus
ASVVPQERQQVTRKHYPNYKVIVLNDDFNTFRHVAACLMKYIPNMISDRAWELTNQVHYGGRAIVWVGPQEQAELYHEPLLRAGLTMAPLEPEGS

SEQ ID NO: 5980 - protein, 95 aa, Thermosynechococcus elongatus; identical to SEQ ID NO: 85

SEQ ID NO: 5981 - protein, 95 aa, Thermosynechococcus elongatus
ASVVPQERQQVTRKHYPNYKVIVLNDDFNTFRHVAACLMKYIPNMISDRAWELTNQVHYGCRAIVWVGPQEQAELYHEQLLRAGLTMAPLEPEGS

SEQ ID NO: 5982 - protein, 95 aa, Thermosynechococcus elongatus
ASVVPQERQQVTRKHYPNYKVIVLNDDFNTFRHVAACLMKYIPKMTSDRAWELTNQVHYEGQAIVWVGPQVQAELYHEQLLRAGLTMAPLEPGGS

SEQ ID NO: 5983 - protein, 95 aa, Thermosynechococcus elongatus
ASVVPQERQQVTRKHYPNYKVIVLNDDFNTFRHVAACLMKYIPNTTSDRAWELTNQVHYKGQAIVWVGPQEQAELNHEQLLRAGLTMAPLEPEGS

SEQ ID NO: 5984 - protein, 95 aa, Thermosynechococcus elongatus; identical to SEQ ID NO: 5

SEQ ID NO: 5985 - protein, 95 aa, Thermosynechococcus elongatus; identical to SEQ ID NO: 55

SEQ ID NO: 5986 - protein, 95 aa, Thermosynechococcus elongatus
ASVVPQERQQVTRKHYPNYKVIVLNDDFNTFRHVAACLMKYIPNMTYDRAWELTNQVHYEGQAIVWVGPQEQAELYHEQLLRAGLTMAPLEPEGS

SEQ ID NO: 5987 - protein, 95 aa, Thermosynechococcus elongatus
ASVVPQERQQVTRKHYPNYKVIVLNDDFNTFRHVAACLMKYIPNMTSHRAWELTNQVHYKGQAIVWVGPQEQAELNHEQLLRAGFTMAPLEPEGS

SEQ ID NO: 5988 - protein, 95 aa, Thermosynechococcus elongatus; identical to SEQ ID NO: 47

SEQ ID NO: 5989 - protein, 95 aa, Thermosynechococcus elongatus
ASVVPQERQQVTRKHYPNYKVIVLNDDFNTFRHVAACLMKYIPNMTSERAWELTNQVHYKGQAIVWVGPQEQAELNHEQLLRAGLTMAPLEPEGS

SEQ ID NO: 5990 - protein, 95 aa, Thermosynechococcus elongatus
ASVVPQERQQVTRKHYPNYKVIVLNDDFNTFRHVAACLMKYIPNMTSDRTWELTNQVHYKGQAIVWVGPQEQAELNHEQLLRAGLTMAPLEPEGS

SEQ ID NO: 5991 - protein, 95 aa, Thermosynechococcus elongatus
ASVVPQERQQVTRKHYPNYKVIVLNDDFNTFRHVAACLMKYIPNMTSDRDWELTNQVHYKGQAIVWVGPQEQAELNHEQLLRAGLTMAPLEPEGS

SEQ ID NO: 5992 - protein, 95 aa, Thermosynechococcus elongatus
ASVVPQERQQVTRKHYPNYKVIVLNDDFNTFRHVAACLMKYIPNMTSDRDWELTNQVHYKGQAIVWVGPQEQAELYHEQLLRAGLTMAPLEPEGS

SEQ ID NO: 5993 - protein, 95 aa, Thermosynechococcus elongatus
ASVVPQERQQVTRKHYPNYKVIVLNDDFNTFRHVAACLMKYIPNMTSDRDWELTNHVHYKGQAIVWVGPQDQAELNHVLLLRAGLTMAPLEPEGS

SEQ ID NO: 5994 - protein, 95 aa, Thermosynechococcus elongatus; identical to SEQ ID NO: 15

SEQ ID NO: 5995 - protein, 95 aa, Thermosynechococcus elongatus
ASVVPQERQQVTRKHYPNYKVIVLNDDFNTFRHVAACLMKYIPNMTSDRARELTNQVHYKGQAIVWVGPQEQAELNHEQLLRAGLTMAPLEPEGS

SEQ ID NO: 5996 - protein, 95 aa, Thermosynechococcus elongatus
ASVVPQERQQVTRKHYPNYKVIVLNDDFNTFRHVAACLMKYIPNMTSDRAGELTNQVHYKRQAIVWVGPQEQAEINPEQLLRAGLTLAPMEPEGS

SEQ ID NO: 5997 - protein, 95 aa, Thermosynechococcus elongatus
ASVVPQERQQVTRKHYPNYKVIVLNDDFNTFRHVAACLMKYIPNMTSDRACELTNQVHYKGQAIVWVGPQEQAELNHEQLLRAGLTMAPLEPEGS

SEQ ID NO: 5998 - protein, 95 aa, Thermosynechococcus elongatus; identical to SEQ ID NO: 5

SEQ ID NO: 5999 - protein, 95 aa, Thermosynechococcus elongatus; identical to SEQ ID NO: 25

SEQ ID NO: 6000 - protein, 52 aa, Thermosynechococcus elongatus
ASVVPQERQQVTRKHYPNYKVIVLNDDFNTFRHVAACLMKYIPNMTSDRAWE

SEQ ID NO: 6001 - protein, 80 aa, Thermosynechococcus elongatus
ASVVPQERQQVTRKHYPNYKVIVLNDDFNTFRHVAACLMKYIPNMTSDRAWELLTKFTTKVKLSYGLVHKNKLNYTTNNC

SEQ ID NO: 6002 - protein, 95 aa, Thermosynechococcus elongatus
ASVVPQERQQVTRKHYPNYKVIVLNDDFNTFRHVAACLMKYIPNMTSDRAWELNNQVHYKGQAIVWVGPQEQAELYHEQLLRAGLTMAPLEPEGS

SEQ ID NO: 6003 - protein, 74 aa, Thermosynechococcus elongatus
ASVVPQERQQVTRKHYPNYKVIVLNDDFNTFRHVAACLMKYIPNMTSDRAWELTTKFTTKVKLSYGLVHKNKLN

SEQ ID NO: 6004 - protein, 77 aa, Thermosynechococcus elongatus
ASVVPQERQQVTRKHYPNYKVIVLNDDFNTFRHVAACLMKYIPNMTSDRAWELTNKVHYICQAILWVCPQEQAELNH

SEQ ID NO: 6005 - protein, 74 aa, Thermosynechococcus elongatus
ASVVPQERQQVTRKHYPNYKVIVLNDDFNTFRHVAACLMKYIPNMTSDRAWELTNQFTTKVKLSYGLVHKNKLN

SEQ ID NO: 6006 - protein, 95 aa, Thermosynechococcus elongatus
ASVVPQERQQVTRKHYPNYKVIVLNDDFNTFRHVAACLMKYIPNMTSDRAWELTNQLHYQGQAIVWVGPQEQAELNHDPLLRAGLTLATLEPEGS

SEQ ID NO: 6007 - protein, 95 aa, Thermosynechococcus elongatus
ASVVPQERQQVTRKHYPNYKVIVLNDDFNTFRHVAACLMKYIPNMTSDRAWELTNQAHYKGQAIVWVGPQEQAELNHEQLLRAGLTMAPLEPEGS

SEQ ID NO: 6008 - protein, 95 aa, Thermosynechococcus elongatus
ASVVPQERQQVTRKHYPNYKVIVLNDDFNTFRHVAACLMKYIPNMTSDRAWELTNQGHYKGQAIVWVGPQEQAELNHEQLLRAGLTMAPLEPEGS

SEQ ID NO: 6009 - protein, 95 aa, Thermosynechococcus elongatus
ASVVPQERQQVTRKHYPNYKVIVLNDDFNTFRHVAACLMKYIPNMTSDRAWELTNQGHYKGQAIVWVGPQEQAELYHEQLLRAGLTMAPLEPEGS

SEQ ID NO: 6010 - protein, 95 aa, Thermosynechococcus elongatus
ASVVPQERQQVTRKHYPNYKVIVLNDDFNTFRHVAACLMKYIPNMTSDRAWELTNQVQYKGQAIVWVGPQEQAELKHEQLLRAGLTMAPLEPEGS

SEQ ID NO: 6011 - protein, 95 aa, Thermosynechococcus elongatus
ASVVPQERQQVTRKHYPNYKVIVLNDDFNTFRHVAACLMKYIPNMTSDRAWELTNQVHNKGQAIVLVGPQEQALLNPEQLLRAGLTMAPFEPEGS

SEQ ID NO: 6012 - protein, 58 aa, Thermosynechococcus elongatus; identical to SEQ ID NO: 5853

SEQ ID NO: 6013 - protein, 58 aa, Thermosynechococcus elongatus; identical to SEQ ID NO: 5853

SEQ ID NO: 6014 - protein, 95 aa, Thermosynechococcus elongatus
ASVVPQERQQVTRKHYPNYKVIVLNDDFNTFRHVAACLMKYIPNMTSDRAWELTNQVHYKAQAIVWVGPQEQAELNHEQLLRAGLTMAPLEPEGS

SEQ ID NO: 6015 - protein, 95 aa, Thermosynechococcus elongatus
ASVVPQERQQVTRKHYPNYKVIVLNDDFNTFRHVAACLMKYIPNMTSDRAWELTNQVHYKAQAIVWVGPQEQAELYHEQLLRAGLTMAPLEPGGS

SEQ ID NO: 6016 - protein, 95 aa, Thermosynechococcus elongatus; identical to SEQ ID NO: 5

SEQ ID NO: 6017 - protein, 95 aa, Thermosynechococcus elongatus; identical to SEQ ID NO: 55

SEQ ID NO: 6018 - protein, 95 aa, Thermosynechococcus elongatus
ASVVPQERQQVTRKHYPNYKVIVLNDDFNTFRHVAACLMKYIPNMTSDRAWELTNQVHYKGKAIVWVGPQEQAELYHEQLLRAGLTMAPLEPEGS

SEQ ID NO: 6019 - protein, 95 aa, Thermosynechococcus elongatus; identical to SEQ ID NO: 5

SEQ ID NO: 6020 - protein, 95 aa, Thermosynechococcus elongatus
ASVVPQERQQVTRKHYPNYKVIVLNDDFNTFRHVAACLMKYIPNMTSDRAWELTNQVHYKGQAIVWVGPQEQAELNHEQLLRAGLSIATLEPKGS

SEQ ID NO: 6021 - protein, 95 aa, Thermosynechococcus elongatus; identical to SEQ ID NO: 55

SEQ ID NO: 6022 - protein, 70 aa, Thermosynechococcus elongatus
ASVVPQERQQVTRKHYPNYKVIVLNDDFNTFRHVAACLMKYIPNMTSDRAWELTNQVHYKGQAIVCVGPQ

SEQ ID NO: 6023 - protein, 95 aa, Thermosynechococcus elongatus
ASVVPQERQQVTRKHYPNYKVIVLNDDFNTFRHVAACLMKYIPNMTSDRAWELTNQVHYKGQAIVRVGPQEQAELYHEQLLRAGLTMAPLEPEGS

SEQ ID NO: 6024 - protein, 95 aa, Thermosynechococcus elongatus
ASVVPQERQQVTRKHYPNYKVIVLNDDFNTFRHVAACLMKYIPNMTSDRAWELTNQVHYKGQAIVWAGPQEQAELYHEQLLRAGLTMAPLEPEGS

SEQ ID NO: 6025 - protein, 95 aa, Thermosynechococcus elongatus; identical to SEQ ID NO: 5

SEQ ID NO: 6026 - protein, 95 aa, Thermosynechococcus elongatus; identical to SEQ ID NO: 5

SEQ ID NO: 6027 - protein, 95 aa, Thermosynechococcus elongatus
ASVVPQERQQVTRKHYPNYKVIVLNDDFNTFRHVAACLMKYIPNMTSDRAWELTNQVHYKGQAIVWVSPQEQAELNHEQLLRAGLTMAPLEPEGS

SEQ ID NO: 6028 - protein, 95 aa, Thermosynechococcus elongatus; identical to SEQ ID NO: 5

SEQ ID NO: 6029 - protein, 95 aa, Thermosynechococcus elongatus; identical to SEQ ID NO: 5

SEQ ID NO: 6030 - protein, 74 aa, Thermosynechococcus elongatus
ASVVPQERQQVTRKHYPNYKVIVLNDDFNTFRHVAACLMKYIPNMTSDRAWELTNQVHYKGQAIVWVGHKNKLN

SEQ ID NO: 6031 - protein, 95 aa, Thermosynechococcus elongatus
ASVVPQERQQVTRKHYPNYKVIVLNDDFNTFRHVAACLMKYIPNMTSDRAWELTNQVHYKGQAIVWVGPQEQDELNHEQLLRAGLTMAPLEPEGS

SEQ ID NO: 6032 - protein, 74 aa, Thermosynechococcus elongatus
ASVVPQERQQVTRKHYPNYKVIVLNDDFNTFRHVAACLMKYIPNMTSDRAWELTNQVHYKGQAIVWVGPQEQAE

SEQ ID NO: 6033 - protein, 95 aa, Thermosynechococcus elongatus
ASVVPQERQQVTRKHYPNYKVIVLNDDFNTFRHVAACLMKYIPNMTSDRAWELTNQVHYKGQAIVWVGPQEQAELNNEQLLRAGLTMAPLEPEGS

SEQ ID NO: 6034 - protein, 95 aa, Thermosynechococcus elongatus
ASVVPQERQQVTRKHYPNYKVIVLNDDFNTFRHVAACLMKYIPNMTSDRAWELTNQVHYKGQAIVWVGPQEQAELNHEKLLRAGLTMAPLEPEGS

SEQ ID NO: 6035 - protein, 95 aa, Thermosynechococcus elongatus
ASVVPQERQQVTRKHYPNYKVIVLNDDFNTFRHVAACLMKYIPNMTSDRAWELTNQVHYKGQAIVWVGPQEQAELNHEKLLRAGLSMAPLDPEGS

SEQ ID NO: 6036 - protein, 95 aa, Thermosynechococcus elongatus; identical to SEQ ID NO: 5

SEQ ID NO: 6037 - protein, 95 aa, Thermosynechococcus elongatus; identical to SEQ ID NO: 1069

SEQ ID NO: 6038 - protein, 95 aa, Thermosynechococcus elongatus
ASVVPQERQQVTRKHYPNYKVIVLNDDFNTFRHVAACLMKYIPNMTSDRAWELTNQVHYKGQAIVWVGPQEQAELNHEQLSRAGLTMAPLEPEGS

SEQ ID NO: 6039 - protein, 95 aa, Thermosynechococcus elongatus
ASVVPQERQQVTRKHYPNYKVIVLNDDFNTFRHVAACLMKYIPNMTSDRAWELTNQVHYKGQAIVWVGPQEQAELNHEQLLRTGLTMAPLEPEGS

SEQ ID NO: 6040 - protein, 95 aa, Thermosynechococcus elongatus; identical to SEQ ID NO: 5

SEQ ID NO: 6041 - protein, 95 aa, Thermosynechococcus elongatus; identical to SEQ ID NO: 5

SEQ ID NO: 6042 - protein, 95 aa, Thermosynechococcus elongatus
ASVVPQERQQVTRKHYPNYKVIVLNDDFNTFRHVAACLMKYIPNMTSDRAWELTNQVHYKGQAIVWVGPQEQAELNHEQLLRAGMTMAPLEPEGS

SEQ ID NO: 6043 - protein, 95 aa, Thermosynechococcus elongatus
ASVVPQERQQVTRKHYPNYKVIVLNDDFNTFRHVAACLMKYIPNMTSDRAWELTNQVHYKGQAIVWVGPQEQAELNHEQLLRAGWTMAPLEPEGS

SEQ ID NO: 6044 - protein, 95 aa, Thermosynechococcus elongatus; identical to SEQ ID NO: 5

SEQ ID NO: 6045 - protein, 95 aa, Thermosynechococcus elongatus; identical to SEQ ID NO: 489

SEQ ID NO: 6046 - protein, 95 aa, Thermosynechococcus elongatus; identical to SEQ ID NO: 773

SEQ ID NO: 6047 - protein, 95 aa, Thermosynechococcus elongatus; identical to SEQ ID NO: 2337

SEQ ID NO: 6048 - protein, 95 aa, Thermosynechococcus elongatus; identical to SEQ ID NO: 5

SEQ ID NO: 6049 - protein, 95 aa, Thermosynechococcus elongatus
ASVVPQERQQVTRKHYPNYKVIVLNDDFNTFRHVAACLMKYIPNMTSDRAWELTNQVHYKGQAIVWVGPQEQAELNHEQLLRAGLTMAQLEPEGS

SEQ ID NO: 6050 - protein, 95 aa, Thermosynechococcus elongatus
ASVVPQERQQVTRKHYPNYKVIVLNDDFNTFRHVAACLMKYIPNMTSDRAWELTNQVHYKGQAIVWVGPQEQAELNHEQLLRAGLTMAQLVPEGS

SEQ ID NO: 6051 - protein, 95 aa, Thermosynechococcus elongatus; identical to SEQ ID NO: 58

SEQ ID NO: 6052 - protein, 90 aa, Thermosynechococcus elongatus; identical to SEQ ID NO: 1752

SEQ ID NO: 6053 - protein, 95 aa, Thermosynechococcus elongatus
ASVVPQERQQVTRKHYPNYKVIVLNDDFNTFRHVAACLMKYIPNMTSDRAWELTNQVHYKGQAIVWVGPQEQAELNHEQLLRAGLTMAPWEPEGS

SEQ ID NO: 6054 - protein, 93 aa, Thermosynechococcus elongatus
ASVVPQERQQVTRKHYPNYKVIVLNDDFNTFRHVAACLMKYIPNMTSDRAWELTNQVHYKGQAIVWVGPQEQAELNHEQLLRAGLTMAPLEPE

SEQ ID NO: 6055 - protein, 95 aa, Thermosynechococcus elongatus; identical to SEQ ID NO: 5

SEQ ID NO: 6056 - protein, 95 aa, Thermosynechococcus elongatus
ASVVPQERQQVTRKHYPNYKVIVLNDDFNTFRHVAACLMKYIPNMTSDRAWELTNQVHYKGQAIVWVGPQEQAELNHEQLLRAGLTMAPLEPVGS

SEQ ID NO: 6057 - protein, 95 aa, Thermosynechococcus elongatus
ASVVPQERQQVTRKHYPNYKVIVLNDDFNTFRHVAACLMKYIPNMTSDRAWELTNQVHYKGQAIVWVGPQEQAELNHEQLLRAGLTMAPLEREGS

SEQ ID NO: 6058 - protein, 95 aa, Thermosynechococcus elongatus
ASVVPQERQQVTRKHYPNYKVIVLNDDFNTFRHVAACLMKYIPNMTSDRAWELTNQVHYKGQAIVWVGPQEQAELNHEQLLRAGLTMAPLESEGS

SEQ ID NO: 6059 - protein, 95 aa, Thermosynechococcus elongatus; identical to SEQ ID NO: 5

SEQ ID NO: 6060 - protein, 95 aa, Thermosynechococcus elongatus; identical to SEQ ID NO: 5

SEQ ID NO: 6061 - protein, 95 aa, Thermosynechococcus elongatus
ASVVPQERQQVTRKHYPNYKVIVLNDDFNTFRHVAACLMKYIPNMTSDRAWELTNQVHYKGQAIVWVGPQEQAELNHEQLLRAGLTMALLEPEGS

SEQ ID NO: 6062 - protein, 95 aa, Thermosynechococcus elongatus; identical to SEQ ID NO: 1754

SEQ ID NO: 6063 - protein, 95 aa, Thermosynechococcus elongatus
ASVVPQERQQVTRKHYPNYKVIVLNDDFNTFRHVAACLMKYIPNMTSDRAWELTNQVHYKGQAIVWVGPQEQAELNHEQLLRACLTMAPLEPEGS

SEQ ID NO: 6064 - protein, 95 aa, Thermosynechococcus elongatus
ASVVPQERQQVTRKHYPNYKVIVLNDDFNTFRHVAACLMKYIPNMTSDRAWELTNQVHYKGQAIVWVGPQEQAELNHEQLLRACLTMAPLEPGGS

SEQ ID NO: 6065 - protein, 95 aa, Thermosynechococcus elongatus
ASVVPQERQQVTRKHYPNYKVIVLNDDFNTFRHVAACLMKYIPNMTSDRAWELTNQVHYKGQAIVWVGPQEQAELNHEQLLRVGLTMAPLEPEGS

SEQ ID NO: 6066 - protein, 95 aa, Thermosynechococcus elongatus
ASVVPQERQQVTRKHYPNYKVIVLNDDFNTFRHVAACLMKYIPNMTSDRAWELTNQVHYKGQAIVWVGPQEQAELNHEQLLRSGLTMAPLEPEGS

SEQ ID NO: 6067 - protein, 95 aa, Thermosynechococcus elongatus
ASVVPQERQQVTRKHYPNYKVIVLNDDFNTFRHVAACLMKYIPNMTSDRAWELTNQVHYKGQAIVWVGPQEQAELNHEQLLSAGLTMAPLEPEGS

SEQ ID NO: 6068 - protein, 95 aa, Thermosynechococcus elongatus; identical to SEQ ID NO: 5

SEQ ID NO: 6069 - protein, 95 aa, Thermosynechococcus elongatus
ASVVPQERQQVTRKHYPNYKVIVLNDDFNTFRHVAACLMKYIPNMTSDRAWELTNQVHYKGQAIVWVGPQEQAELNHEQFLRAGLTMAPLEPDGS

SEQ ID NO: 6070 - protein, 95 aa, Thermosynechococcus elongatus; identical to SEQ ID NO: 1074

SEQ ID NO: 6071 - protein, 95 aa, Thermosynechococcus elongatus
ASVVPQERQQVTRKHYPNYKVIVLNDDFNTFRHVAACLMKYIPNMTSDRAWELTNQVHYKGQAIVWVGPQEQAELNHEPLLRAGLTMAPLEPEGS

SEQ ID NO: 6072 - protein, 95 aa, Thermosynechococcus elongatus
ASVVPQERQQVTRKHYPNYKVIVLNDDFNTFRHVAACLMKYIPNMTSDRAWELTNQVHYKGQAIVWVGPQEQAELNHERLLRAGLTMAPLEPEGS

SEQ ID NO: 6073 - protein, 78 aa, Thermosynechococcus elongatus
ASVVPQERQQVTRKHYPNYKVIVLNDDFNTFRHVAACLMKYIPNMTSDRAWELTNQVHYKGQAIVWVGPQEQAELNHE

SEQ ID NO: 6074 - protein, 95 aa, Thermosynechococcus elongatus; identical to SEQ ID NO: 5

SEQ ID NO: 6075 - protein, 95 aa, Thermosynechococcus elongatus
ASVVPQERQQVTRKHYPNYKVIVLNDDFNTFRHVAACLMKYIPNMTSDRAWELTNQVHYKGQAIVWVGPQEQAELNHAQLLRAGLTMAPLEPEGS

SEQ ID NO: 6076 - protein, 95 aa, Thermosynechococcus elongatus; identical to SEQ ID NO: 6075

SEQ ID NO: 6077 - protein, 77 aa, Thermosynechococcus elongatus; identical to SEQ ID NO: 602

SEQ ID NO: 6078 - protein, 95 aa, Thermosynechococcus elongatus
ASVVPQERQQVTRKHYPNYKVIVLNDDFNTFRHVAACLMKYIPNMTSDRAWELTNQVHYKGQAIVWVGPQEQAELNQEPLLRAGLTMAPLEPEGS

SEQ ID NO: 6079 - protein, 95 aa, Thermosynechococcus elongatus
ASVVPQERQQVTRKHYPNYKVIVLNDDFNTFRHVAACLMKYIPNMTSDRAWELTNQVHYKGQAIVWVGPQEQAELNLEQLLRAGLTMAPLEPEGS

SEQ ID NO: 6080 - protein, 95 aa, Thermosynechococcus elongatus
ASVVPQERQQVTRKHYPNYKVIVLNDDFNTFRHVAACLMKYIPNMTSDRAWELTNQVHYKGQAIVWVGPQEQAELNYEQLLRAGLTMAPLEPEGS

SEQ ID NO: 6081 - protein, 95 aa, Thermosynechococcus elongatus
ASVVPQERQQVTRKHYPNYKVIVLNDDFNTFRHVAACLMKYIPNMTSDRAWELTNQVHYKGQAIVWVGPQEQAELYHEQVLRAGLTMAPLEPEGS

SEQ ID NO: 6082 - protein, 95 aa, Thermosynechococcus elongatus
ASVVPQERQQVTRKHYPNYKVIVLNDDFNTFRHVAACLMKYIPNMTSDRAWELTNQVHYKGQAIVWVGPQEQAELYHEQVLRAGLTMAPLEPGGS

SEQ ID NO: 6083 - protein, 95 aa, Thermosynechococcus elongatus; identical to SEQ ID NO: 55

SEQ ID NO: 6084 - protein, 95 aa, Thermosynechococcus elongatus
ASVVPQERQQVTRKHYPNYKVIVLNDDFNTFRHVAACLMKYIPNMTSDRAWELTNQVHYKGQAIVWVGPQEQAELYHEQLLRAGLTMATLEPGGS

SEQ ID NO: 6085 - protein, 95 aa, Thermosynechococcus elongatus
ASVVPQERQQVTRKHYPNYKVIVLNDDFNTFRHVAACLMKYIPNMTSDRAWELTNQVHYKGQAIVWVGPQEQAELYHEQLLRAGLTMAQLEPEGS

SEQ ID NO: 6086 - protein, 95 aa, Thermosynechococcus elongatus; identical to SEQ ID NO: 55

SEQ ID NO: 6087 - protein, 95 aa, Thermosynechococcus elongatus
ASVVPQERQQVTRKHYPNYKVIVLNDDFNTFRHVAACLMKYIPNMTSDRAWELTNQVHYKGQAIVWVGPQEQAELYHEQLLRAGLTMAPLEPDGS

SEQ ID NO: 6088 - protein, 92 aa, Thermosynechococcus elongatus
ASVVPQERQQVTRKHYPNYKVIVLNDDFNTFRHVAACLMKYIPNMTSDRAWELTNQVHYKGQAIVWVGPQEQAELYHEQLLRAGLTMAPLEP

SEQ ID NO: 6089 - protein, 95 aa, Thermosynechococcus elongatus
ASVVPQERQQVTRKHYPNYKVIVLNDDFNTFRHVAACLMKYIPNMTSDRAWELTNQVHYKGQAIVWVGPQEQAELYHEQLLRAGLTMSPLEPGGS

SEQ ID NO: 6090 - protein, 95 aa, Thermosynechococcus elongatus
ASVVPQERQQVTRKHYPNYKVIVLNDDFNTFRHVAACLMKYIPNMTSDRAWELTNQVHYKGQAIVWVGPQEQAELYYEQLLRAGLTMAPLEPKGS

SEQ ID NO: 6091 - protein, 95 aa, Thermosynechococcus elongatus
ASVVPQERQQVTRKHYPNYKVIVLNDDFNTFRHVAACLMKYIPNMTSDRAWELTNQVHYKGQAIVWVGPQEQADLNHEQLLRAGLTMAPLEPEGS

SEQ ID NO: 6092 - protein, 95 aa, Thermosynechococcus elongatus
ASVVPQERQQVTRKHYPNYKVIVLNDDFNTFRHVAACLMKYIPNMTSDRAWELTNQVHYKGQAIVWVGPQEQSELNHEQLLRAGLTMAPLEPEGS

SEQ ID NO: 6093 - protein, 95 aa, Thermosynechococcus elongatus; identical to SEQ ID NO: 6092

SEQ ID NO: 6094 - protein, 95 aa, Thermosynechococcus elongatus; identical to SEQ ID NO: 1224

SEQ ID NO: 6095 - protein, 95 aa, Thermosynechococcus elongatus
ASVVPQERQQVTRKHYPNYKVIVLNDDFNTFRHVAACLMKYIPNMTSDRAWELTNQVHYKGQAIVWVGPQELAELNHEQLLRAGLTMAPLEPEGS

SEQ ID NO: 6096 - protein, 95 aa, Thermosynechococcus elongatus
ASVVPQERQQVTRKHYPNYKVIVLNDDFNTFRHVAACLMKYIPNMTSDRAWELTNQVHYKGQAIVWVGPQGQAELNHEQLLRAGLTMAPLEPEGS

SEQ ID NO: 6097 - protein, 95 aa, Thermosynechococcus elongatus
ASVVPQERQQVTRKHYPNYKVIVLNDDFNTFRHVAACLMKYIPNMTSDRAWELTNQVHYKGQAIVWVGPPEQAELNHEQLLRAGLTMAPLEPEGS

SEQ ID NO: 6098 - protein, 95 aa, Thermosynechococcus elongatus
ASVVPQERQQVTRKHYPNYKVIVLNDDFNTFRHVAACLMKYIPNMTSDRAWELTNQVHYKGQAIVWVGPREQAELNHEQLLRAGLTMAPLEPEGS

SEQ ID NO: 6099 - protein, 95 aa, Thermosynechococcus elongatus
ASVVPQERQQVTRKHYPNYKVIVLNDDFNTFRHVAACLMKYIPNMTSDRAWELTNQVHYKGQAIVWVVPQEQAELNHEQLLRAGLTMAPLEPEGS

SEQ ID NO: 6100 - protein, 95 aa, Thermosynechococcus elongatus; identical to SEQ ID NO: 1079

SEQ ID NO: 6101 - protein, 77 aa, Thermosynechococcus elongatus
ASVVPQERQQVTRKHYPNYKVIVLNDDFNTFRHVAACLMKYIPNMTSDRAWELTNQVHYKGQAIVWVCPQEQAELNH

SEQ ID NO: 6102 - protein, 95 aa, Thermosynechococcus elongatus
ASVVPQERQQVTRKHYPNYKVIVLNDDFNTFRHVAACLMKYIPNMTSDRAWELTNQVHYKGQAIVWFGPQEQAELYHEQLLRAGLTMAPLEPEGS

SEQ ID NO: 6103 - protein, 95 aa, Thermosynechococcus elongatus
ASVVPQERQQVTRKHYPNYKVIVLNDDFNTFRHVAACLMKYIPNMTSDRAWELTNQVHYKGQAIVCVGPQEQAELYHEQLLRAGLTMAPLEPEGS

SEQ ID NO: 6104 - protein, 95 aa, Thermosynechococcus elongatus
ASVVPQERQQVTRKHYPNYKVIVLNDDFNTFRHVAACLMKYIPNMTSDRAWELTNQVHYKGQAIVCVGPQELAVLNLELLLRAGLTLAPLEPEGS

SEQ ID NO: 6105 - protein, 95 aa, Thermosynechococcus elongatus; identical to SEQ ID NO: 1070

SEQ ID NO: 6106 - protein, 95 aa, Thermosynechococcus elongatus
ASVVPQERQQVTRKHYPNYKVIVLNDDFNTFRHVAACLMKYIPNMTSDRAWELTNQVHYKGQAIVWVGPQEQAELNHDHLLRAGLTMAPLEPEGS

SEQ ID NO: 6107 - protein, 95 aa, Thermosynechococcus elongatus; identical to SEQ ID NO: 775

SEQ ID NO: 6108 - protein, 95 aa, Thermosynechococcus elongatus; identical to SEQ ID NO: 55

SEQ ID NO: 6109 - protein, 95 aa, Thermosynechococcus elongatus
ASVVPQERQQVTRKHYPNYKVIVLNDDFNTFRHVAACLMKYIPNMTSDRAWELTNQVHYKGQAIVWVGPQEQAELYHEQLLRAGLTIAPLEPEGS

SEQ ID NO: 6110 - protein, 95 aa, Thermosynechococcus elongatus
ASVVPQERQQVTRKHYPNYKVIVLNDDFNTFRHVAACLMKYIPNMTSDRAWELTNQVHYKGQAIVWVGPQEQADLYHEQLLRAGLTMAPLEPEGS

SEQ ID NO: 6111 - protein, 95 aa, Thermosynechococcus elongatus; identical to SEQ ID NO: 1077

SEQ ID NO: 6112 - protein, 95 aa, Thermosynechococcus elongatus; identical to SEQ ID NO: 201

SEQ ID NO: 6113 - protein, 95 aa, Thermosynechococcus elongatus
ASVVPQERQQVTRKHYPNYKVIVLNDDFNTFRHVAACLMKYIPNMTSDRAWELTNQVHYKGQAILWVGPQEQAELNHEQLLRAGLTMAPLEPEGS

SEQ ID NO: 6114 - protein, 95 aa, Thermosynechococcus elongatus; identical to SEQ ID NO: 5

SEQ ID NO: 6115 - protein, 95 aa, Thermosynechococcus elongatus
ASVVPQERQQVTRKHYPNYKVIVLNDDFNTFRHVAACLMKYIPNMTSDRAWELTNQVHYKGQSIVWVGPQEQAELNHEQLLRAGLTMAPLEPEGS

SEQ ID NO: 6116 - protein, 95 aa, Thermosynechococcus elongatus; identical to SEQ ID NO: 604

SEQ ID NO: 6117 - protein, 95 aa, Thermosynechococcus elongatus
ASVVPQERQQVTRKHYPNYKVIVLNDDFNTFRHVAACLMKYIPNMTSDRAWELTNQVHYKGRAIVWVGPQEQAELYHEQLLRAGLTMAPLEPGGS

SEQ ID NO: 6118 - protein, 95 aa, Thermosynechococcus elongatus
ASVVPQERQQVTRKHYPNYKVIVLNDDFNTFRHVAACLMKYIPNMTSDRAWELTNQVHYKGLAIVWVGPQEQAELNHEQLLRAGLTMAQLEPEGS

SEQ ID NO: 6119 - protein, 95 aa, Thermosynechococcus elongatus
ASVVPQERQQVTRKHYPNYKVIVLNDDFNTFRHVAACLMKYIPNMTSDRAWELTNQVHYKGLAIVWVGPQEQAELNHEQLLRAGLTLAPLEPEGS

SEQ ID NO: 6120 - protein, 95 aa, Thermosynechococcus elongatus
ASVVPQERQQVTRKHYPNYKVIVLNDDFNTFRHVAACLMKYIPNMTSDRAWELTNQVHYKGLSIVWVGTQEQSELNHEHLLRAGLTMAPLETEGS

SEQ ID NO: 6121 - protein, 61 aa, Thermosynechococcus elongatus
ASVVPQERQQVTRKHYPNYKVIVLNDDFNTFRHVAACLMKYIPNMTSDRAWELTNQVHYKG

SEQ ID NO: 6122 - protein, 95 aa, Thermosynechococcus elongatus
ASVVPQERQQVTRKHYPNYKVIVLNDDFNTFRHVAACLMKYIPNMTSDRAWELTNQVHYKVQAIVWVGPQEQAELNHEQLLRAGLTMAPLEPEGS

SEQ ID NO: 6123 - protein, 95 aa, Thermosynechococcus elongatus; identical to SEQ ID NO: 6122

SEQ ID NO: 6124 - protein, 95 aa, Thermosynechococcus elongatus
ASVVPQERQQVTRKHYPNYKVIVLNDDFNTFRHVAACLMKYIPNMTSDRAWELTNQVHYKCQAIVWVGPQEQAELNHEQLLRAGLTMAPLEPEGS

SEQ ID NO: 6125 - protein, 95 aa, Thermosynechococcus elongatus; identical to SEQ ID NO: 6124

SEQ ID NO: 6126 - protein, 95 aa, Thermosynechococcus elongatus
ASVVPQERQQVTRKHYPNYKVIVLNDDFNTFRHVAACLMKYIPNMTSDRAWELTNQVHYKCQAIVWVGPQEQAELNHEQLLRAGLTMAPFDREGS

SEQ ID NO: 6127 - protein, 95 aa, Thermosynechococcus elongatus
ASVVPQERQQVTRKHYPNYKVIVLNDDFNTFRHVAACLMKYIPNMTSDRAWELTNQVHYKCQAIVWVGPQEQSELNHEQLLRAGLTMAQLEPEGS

SEQ ID NO: 6128 - protein, 95 aa, Thermosynechococcus elongatus
ASVVPQERQQVTRKHYPNYKVIVLNDDFNTFRHVAACLMKYIPNMTSDRAWELTNQVHYKCQAIVCVCKQEQAELNHEQLLRAGLTMAPLEPEGS

SEQ ID NO: 6129 - protein, 95 aa, Thermosynechococcus elongatus; identical to SEQ ID NO: 1081

SEQ ID NO: 6130 - protein, 95 aa, Thermosynechococcus elongatus
ASVVPQERQQVTRKHYPNYKVIVLNDDFNTFRHVAACLMKYIPNMTSDRAWELTNQVHYNGQAIVWVGPQEQAELYHEQLLRAGLTMAPLEPEGS

SEQ ID NO: 6131 - protein, 95 aa, Thermosynechococcus elongatus; identical to SEQ ID NO: 5

SEQ ID NO: 6132 - protein, 95 aa, Thermosynechococcus elongatus; identical to SEQ ID NO: 55

SEQ ID NO: 6133 - protein, 95 aa, Thermosynechococcus elongatus; identical to SEQ ID NO: 1081

SEQ ID NO: 6134 - protein, 95 aa, Thermosynechococcus elongatus; identical to SEQ ID NO: 154

SEQ ID NO: 6135 - protein, 95 aa, Thermosynechococcus elongatus
ASVVPQERQQVTRKHYPNYKVIVLNDDFNTFRHVAACLMKYIPNMTSDRAWELTNQVHYTGQAIVWVGPQEQAELNHEQLLRAGLTMAPLDPEGS

SEQ ID NO: 6136 - protein, 95 aa, Thermosynechococcus elongatus
ASVVPQERQQVTRKHYPNYKVIVLNDDFNTFRHVAACLMKYIPNMTSDRAWELTNQVHYTGQAIVWVGPQEQAELNHEPLLRAGLTMAPLEPEGS

SEQ ID NO: 6137 - protein, 95 aa, Thermosynechococcus elongatus
ASVVPQERQQVTRKHYPNYKVIVLNDDFNTFRHVAACLMKYIPNMTSDRAWELTNQVHYTGLAIVWVGPQEQAELNHEQLLRAGLTMAPLEPEGS

SEQ ID NO: 6138 - protein, 95 aa, Thermosynechococcus elongatus; identical to SEQ ID NO: 154

SEQ ID NO: 6139 - protein, 95 aa, Thermosynechococcus elongatus
ASVVPQERQQVTRKHYPNYKVIVLNDDFNTFRHVAACLMKYIPNMTSDRAWELTNQVHYIGQAIVWVGPQEQAELNHEQLLRAGLTMAPLYPEGS

SEQ ID NO: 6140 - protein, 95 aa, Thermosynechococcus elongatus
ASVVPQERQQVTRKHYPNYKVIVLNDDFNTFRHVAACLMKYIPNMTSDRAWELTNQVHYIGLAIVWFGPQEQAELNHEQLLRAGLTMAPLEPEGS

SEQ ID NO: 6141 - protein, 95 aa, Thermosynechococcus elongatus; identical to SEQ ID NO: 5842

SEQ ID NO: 6142 - protein, 95 aa, Thermosynechococcus elongatus
ASVVPQERQQVTRKHYPNYKVIVLNDDFNTFRHVAACLMKYIPNMTSDRAWELTNQVHYEGQAIVWVCPQEQAELYHEQLLRAGLTMAPLEPEGS

SEQ ID NO: 6143 - protein, 95 aa, Thermosynechococcus elongatus; identical to SEQ ID NO: 25

SEQ ID NO: 6144 - protein, 95 aa, Thermosynechococcus elongatus; identical to SEQ ID NO: 250

SEQ ID NO: 6145 - protein, 95 aa, Thermosynechococcus elongatus
ASVVPQERQQVTRKHYPNYKVIVLNDDFNTFRHVAACLMKYIPNMTSDRAWELTNQVHYEGQAIVWVGPQEQAELYHEQVLRAGLTMAPLEPEGS

SEQ ID NO: 6146 - protein, 95 aa, Thermosynechococcus elongatus; identical to SEQ ID NO: 1063

SEQ ID NO: 6147 - protein, 95 aa, Thermosynechococcus elongatus; identical to SEQ ID NO: 1727

SEQ ID NO: 6148 - protein, 95 aa, Thermosynechococcus elongatus; identical to SEQ ID NO: 105

SEQ ID NO: 6149 - protein, 95 aa, Thermosynechococcus elongatus; identical to SEQ ID NO: 1728

SEQ ID NO: 6150 - protein, 95 aa, Thermosynechococcus elongatus
ASVVPQERQQVTRKHYPNYKVIVLNDDFNTFRHVAACLMKYIPNMTSDRAWELTNQVHYEGQAIVWVGPQEQAELYHEQLLRAGLTMAPLEGEGS

SEQ ID NO: 6151 - protein, 95 aa, Thermosynechococcus elongatus
ASVVPQERQQVTRKHYPNYKVIVLNDDFNTFRHVAACLMKYIPNMTSDRAWELTNQVHYEGQAIVWVGPQEHAELYHEQLLRAGLTMAPLEPEGS

SEQ ID NO: 6152 - protein, 95 aa, Thermosynechococcus elongatus; identical to SEQ ID NO: 25

SEQ ID NO: 6153 - protein, 95 aa, Thermosynechococcus elongatus; identical to SEQ ID NO: 25

SEQ ID NO: 6154 - protein, 95 aa, Thermosynechococcus elongatus
ASVVPQERQQVTRKHYPNYKVIVLNDDFNTFRHVAACLMKYIPNMTSDRAWELTNQVHYEGQAIVWVGPQVQAELYHEQLLRAGLTIAPLEPEGS

SEQ ID NO: 6155 - protein, 95 aa, Thermosynechococcus elongatus
ASVVPQERQQVTRKHYPNYKVIVLNDDFNTFRHVAACLMKYIPNMTSDRAWELTNQVHYEGQAIVWVGPQVQAELYHEQLLRACLTMAPLEPEGS

SEQ ID NO: 6156 - protein, 95 aa, Thermosynechococcus elongatus; identical to SEQ ID NO: 25

SEQ ID NO: 6157 - protein, 70 aa, Thermosynechococcus elongatus
ASVVPQERQQVTRKHYPNYKVIVLNDDFNTFRHVAACLMKYIPNMTSDRAWELTNQVHYEGQAIVWVGPQ

SEQ ID NO: 6158 - protein, 95 aa, Thermosynechococcus elongatus; identical to SEQ ID NO: 32

SEQ ID NO: 6159 - protein, 95 aa, Thermosynechococcus elongatus; identical to SEQ ID NO: 601

SEQ ID NO: 6160 - protein, 95 aa, Thermosynechococcus elongatus
ASVVPQERQQVTRKHYPNYKVIVLNDDFNTFRHVAACLMKYIPNMTSDRAWELTNQVHYEGQAIVWVVPQEQAELYHEQLLRAGLTMAPLEPEGS

SEQ ID NO: 6161 - protein, 95 aa, Thermosynechococcus elongatus; identical to SEQ ID NO: 15

SEQ ID NO: 6162 - protein, 95 aa, Thermosynechococcus elongatus; identical to SEQ ID NO: 420

SEQ ID NO: 6163 - protein, 95 aa, Thermosynechococcus elongatus
ASVVPQERQQVTRKHYPNYKVIVLNDDFNTFRHVAACLMKYIPNMTSDRAWELTNQVHYDGQAIVWVGPQEQAELYHEQLLRAGLTMAPLVPEGS

SEQ ID NO: 6164 - protein, 95 aa, Thermosynechococcus elongatus
ASVVPQERQQVTRKHYPNYKVIVLNDDFNTFRHVAACLMKYIPNMTSDRAWELTNQVHYGGQAIVWVGPQEQAELNHEQLLRAGLTMAPLEPEGS

SEQ ID NO: 6165 - protein, 95 aa, Thermosynechococcus elongatus; identical to SEQ ID NO: 47

SEQ ID NO: 6166 - protein, 95 aa, Thermosynechococcus elongatus
ASVVPQERQQVTRKHYPNYKVIVLNDDFNTFRHVAACLMKYIPNMTSDRAWELTNQVHYGGRAIVWVGQQEQAELYHEQLLRAGLTMAPLEPEGS

SEQ ID NO: 6167 - protein, 95 aa, Thermosynechococcus elongatus
ASVVPQERQQVTRKHYPNYKVIVLNDDFNTFRHVAACLMKYIPNMTSDRAWELTNQVHYGGRAIVWVGPQEQAELNHEQLLRAGLTMAPLEPEGS

SEQ ID NO: 6168 - protein, 79 aa, Thermosynechococcus elongatus
ASVVPQERQQVTRKHYPNYKVIVLNDDFNTFRHVAACLMKYIPNMTSDRAWELTNQVHYGGRAIVWVGPQEQAELYHEQ

SEQ ID NO: 6169 - protein, 95 aa, Thermosynechococcus elongatus; identical to SEQ ID NO: 47

SEQ ID NO: 6170 - protein, 95 aa, Thermosynechococcus elongatus
ASVVPQERQQVTRKHYPNYKVIVLNDDFNTFRHVAACLMKYIPNMTSDRAWELTNQVHYGGRAIVWVGPQEQAELYHEQLLRAGFTMAPLEPEGS

SEQ ID NO: 6171 - protein, 95 aa, Thermosynechococcus elongatus
ASVVPQERQQVTRKHYPNYKVIVLNDDFNTFRHVAACLMKYIPNMTSDRAWELTNQVHYGGRAIVWVGPLEQAELYHEQLLRAGLTMAPLEPEGS

SEQ ID NO: 6172 - protein, 95 aa, Thermosynechococcus elongatus
ASVVPQERQQVTRKHYPNYKVIVLNDDFNTFRHVAACLMKYIPNMTSDRAWELTNQVHYVGQAIVWVGPQEQAELNHEQLLRAGLTMAPLEPEGS

SEQ ID NO: 6173 - protein, 95 aa, Thermosynechococcus elongatus; identical to SEQ ID NO: 1736

SEQ ID NO: 6174 - protein, 95 aa, Thermosynechococcus elongatus
ASVVPQERQQVTRKHYPNYKVIVLNDDFNTFRHVAACLMKYIPNMTSDRAWELTNQVHCEGQAIVWVGPQEQAELYHEQLLRAGLTMAPLEPEGS

SEQ ID NO: 6175 - protein, 95 aa, Thermosynechococcus elongatus; identical to SEQ ID NO: 5740

SEQ ID NO: 6176 - protein, 95 aa, Thermosynechococcus elongatus
ASVVPQERQQVTRKHYPNYKVIVLNDDFNTFRHVAACLMKYIPNMTSDRAWELTNQVHFGGRAIVWVGPQEQAELYHEQLLRAGLTMAPLEPGGS

SEQ ID NO: 6177 - protein, 59 aa, Thermosynechococcus elongatus
ASVVPQERQQVTRKHYPNYKVIVLNDDFNTFRHVAACLMKYIPNMTSDRAWELTNQVHF

SEQ ID NO: 6178 - protein, 95 aa, Thermosynechococcus elongatus
ASVVPQERQQVTRKHYPNYKVIVLNDDFNTFRHVAACLMKYIPNMTSDRAWELTNQVRYKGQAIVWVGPQEQAELNHEQLLRAGLTMAPLEPEGS

SEQ ID NO: 6179 - protein, 95 aa, Thermosynechococcus elongatus
ASVVPQERQQVTRKHYPNYKVIVLNDDFNTFRHVAACLMKYIPNMTSDRAWELTNQVLYKGQAIVWVGPQEQAELNHEQLLRAGLTMAPLEPEGS

SEQ ID NO: 6180 - protein, 95 aa, Thermosynechococcus elongatus
ASVVPQERQQVTRKHYPNYKVIVLNDDFNTFRHVAACLMKYIPNMTSDRAWELTNQVLYKGQAIVWVGPHEQAELNHEQLLRAGLTMAPLEPEGS

SEQ ID NO: 6181 - protein, 73 aa, Thermosynechococcus elongatus
ASVVPQERQQVTRKHYPNYKVIVLNDDFNTFRHVAACLMKYIPNMTSDRAWELTNQVLYIGLAIVLVGTQEQA

SEQ ID NO: 6182 - protein, 95 aa, Thermosynechococcus elongatus
ASVVPQERQQVTRKHYPNYKVIVLNDDFNTFRHVAACLMKYIPNMTSDRAWELTNQFHYKGQAIVWVGPQEQAELNHEQLLRAGLTMAPLEPEGS

SEQ ID NO: 6183 - protein, 95 aa, Thermosynechococcus elongatus
ASVVPQERQQVTRKHYPNYKVIVLNDDFNTFRHVAACLMKYIPNMTSDRAWELTNQFHYEGQAIVWVGPQEQAELYHEQLLRAGLTMAPLEPEGS

SEQ ID NO: 6184 - protein, 95 aa, Thermosynechococcus elongatus
ASVVPQERQQVTRKHYPNYKVIVLNDDFNTFRHVAACLMKYIPNMTSDRAWELTNHVHYKGQAIVWVGPQEQAELNHEQLWRAGLTMAPLEPEGS

SEQ ID NO: 6185 - protein, 95 aa, Thermosynechococcus elongatus
ASVVPQERQQVTRKHYPNYKVIVLNDDFNTFRHVAACLMKYIPNMTSDRAWELTNHVHYKGQAIVWVGPQEQAELNHEQLLRAGLTMAPLEPKGS

SEQ ID NO: 6186 - protein, 95 aa, Thermosynechococcus elongatus
ASVVPQERQQVTRKHYPNYKVIVLNDDFNTFRHVAACLMKYIPNMTSDRAWELTNHVLYKGLAIVWVGPQEQAELNHDQLVRAGLTLAPLEPEGS

SEQ ID NO: 6187 - protein, 90 aa, Thermosynechococcus elongatus
ASVVPQERQQVTRKHYPNYKVIVLNDDFNTFRHVAACLMKYIPNMTSDRAWELTNHVLYGGRAIVWVGPQEQAELYHEQLLRAGLTMAPL

SEQ ID NO: 6188 - protein, 95 aa, Thermosynechococcus elongatus; identical to SEQ ID NO: 1778

SEQ ID NO: 6189 - protein, 95 aa, Thermosynechococcus elongatus
ASVVPQERQQVTRKHYPNYKVIVLNDDFNTFRHVAACLMKYIPNMTSDRAWELTNLVHYKGQAIVWVGPQEQAELTHEHLLRAGLTMAPLEPEGS

SEQ ID NO: 6190 - protein, 95 aa, Thermosynechococcus elongatus
ASVVPQERQQVTRKHYPNYKVIVLNDDFNTFRHVAACLMKYIPNMTSDRAWELTHQVHYKGQAIVWVGPQEQAELNHEQLLRAGLTMAPLEPEGS

SEQ ID NO: 6191 - protein, 95 aa, Thermosynechococcus elongatus
ASVVPQERQQVTRKHYPNYKVIVLNDDFNTFRHVAACLMKYIPNMTSDRAWELTDQVHYKGQAIVWVGPQEQAELNHEQLLRAGLTMAPLEPEGS

SEQ ID NO: 6192 - protein, 95 aa, Thermosynechococcus elongatus
ASVVPQERQQVTRKHYPNYKVIVLNDDFNTFRHVAACLMKYIPNMTSDRAWELINQVHYKGQAIVWVGPQVQAELYHEQLLRAGLTMAPLEPEGS

SEQ ID NO: 6193 - protein, 95 aa, Thermosynechococcus elongatus; identical to SEQ ID NO: 1779

SEQ ID NO: 6194 - protein, 95 aa, Thermosynechococcus elongatus
ASVVPQERQQVTRKHYPNYKVIVLNDDFNTFRHVAACLMKYIPNMTSDRAWEFTNQVHYKGQAIVWVGPQVQAELYHEQLLRAGLTMAPLEPGGS

SEQ ID NO: 6195 - protein, 95 aa, Thermosynechococcus elongatus
ASVVPQERQQVTRKHYPNYKVIVLNDDFNTFRHVAACLMKYIPNMTSDRAWDLTNQVHYKGQAIVWVGPQEQAELNHEQLLRAGLTMAPLEPKGS

SEQ ID NO: 6196 - protein, 95 aa, Thermosynechococcus elongatus; identical to SEQ ID NO: 5

SEQ ID NO: 6197 - protein, 95 aa, Thermosynechococcus elongatus
ASVVPQERQQVTRKHYPNYKVIVLNDDFNTFRHVAACLMKYIPNMTSDRAWGLTNQVHYKGQAIVWVGPQEQAELNHEQLLRAGLTMAPLEPEGS

SEQ ID NO: 6198 - protein, 95 aa, Thermosynechococcus elongatus; identical to SEQ ID NO: 5997

SEQ ID NO: 6199 - protein, 95 aa, Thermosynechococcus elongatus
ASVVPQERQQVTRKHYPNYKVIVLNDDFNTFRHVAACLMKYIPNMTSDRACELTNQVHYKGQAIVWVGPQEQAELYHEQLLRAGLTMAPLEPEGS

SEQ ID NO: 6200 - protein, 95 aa, Thermosynechococcus elongatus
ASVVPQERQQVTRKHYPNYKVIVLNDDFNTFRHVAACLMKYIPNMTSDRVWELTNQVHYKGQAIVWVGPQEQAELNHEQLLRAGLTMAPLEPEGS

SEQ ID NO: 6201 - protein, 95 aa, Thermosynechococcus elongatus
ASVVPQERQQVTRKHYPNYKVIVLNDDFNTFRHVAACLMKYIPNMTSDSAWELTNQVHYKGQAIVWVGPQEQAELNHEQLLRAGLTMAPLEPEGS

SEQ ID NO: 6202 - protein, 95 aa, Thermosynechococcus elongatus
ASVVPQERQQVTRKHYPNYKVIVLNDDFNTFRHVAACLMKYIPNMTSDIAWELTNQVHYKGQAIVWVGPQEQAELNHEQLLRAGLTMAPLEPEGS

SEQ ID NO: 6203 - protein, 95 aa, Thermosynechococcus elongatus
ASVVPQERQQVTRKHYPNYKVIVLNDDFNTFRHVAACLMKYIPNMTSDGAWELTNQVHYKGQAIVWVGPQEQAELNHEQLLRAGLTMSPLEPEGS

SEQ ID NO: 6204 - protein, 95 aa, Thermosynechococcus elongatus
ASVVPQERQQVTRKHYPNYKVIVLNDDFNTFRHVAACLMKYIPNMTSYRAWELTNQVHYKGQAIVWVGPQEQAELNHEQLLRAGLTMAPLEPEGS

SEQ ID NO: 6205 - protein, 95 aa, Thermosynechococcus elongatus
ASVVPQERQQVTRKHYPNYKVIVLNDDFNTFRHVAACLMKYIPNMTFDRAWELTNQVHYKGQAIVWVGPQEQAELNHEQLLRAGLTMAPLEPEGS

SEQ ID NO: 6206 - protein, 95 aa, Thermosynechococcus elongatus
ASVVPQERQQVTRKHYPNYKVIVLNDDFNTFRHVAACLMKYIPNMSSDRAWDLTNQVHYKGQAIVWVGPQEQAELNHEQLLRAGLTMAPLEPEGS

SEQ ID NO: 6207 - protein, 95 aa, Thermosynechococcus elongatus; identical to SEQ ID NO: 5971

SEQ ID NO: 6208 - protein, 95 aa, Thermosynechococcus elongatus; identical to SEQ ID NO: 5978

SEQ ID NO: 6209 - protein, 95 aa, Thermosynechococcus elongatus; identical to SEQ ID NO: 85

SEQ ID NO: 6210 - protein, 95 aa, Thermosynechococcus elongatus
ASVVPQERQQVTRKHYPNYKVIVLNDDFNTFRHVAACLMKYIPNMSSDRAWELTNQVHYKGQAIVWVGPQEQAELNHEQLLRAGLTMAPLEPEGS

SEQ ID NO: 6211 - protein, 95 aa, Thermosynechococcus elongatus
ASVVPQERQQVTRKHYPNYKVIVLNDDFNTFRHVAACLMKYIPNITSDRAWELTNQVHYKGQAIVWVGPQEQAELNHEQLLRAGLTMAPLEPEGS

SEQ ID NO: 6212 - protein, 95 aa, Thermosynechococcus elongatus
ASVVPQERQQVTRKHYPNYKVIVLNDDFNTFRHVAACLMKYIPNITSDRAWELTNQVHYGGRAIVWVGPQEQAELYHEQLLRAGLTMAPLEPEGS

SEQ ID NO: 6213 - protein, 95 aa, Thermosynechococcus elongatus
ASVVPQERQQVTRKHYPNYKVIVLNDDFNTFRHVAACLMKYIPSMTSDRAWELTNQVHYKGQAIVWVGPQEQAELNHEQLLRAGLTMAPLEPEGS

SEQ ID NO: 6214 - protein, 95 aa, Thermosynechococcus elongatus
ASVVPQERQQVTRKHYPNYKVIVLNDDFNTFRHVAACLMKYIPSMTSDRAWELTNQVHYGGRAIVWVGPQEQAELYHEQLLRAGLTMAPLEPEGS

SEQ ID NO: 6215 - protein, 95 aa, Thermosynechococcus elongatus
ASVVPQERQQVTRKHYPNYKVIVLNDDFNTFRHVAACLMKYIPHMTSDRAWELTNQVHYKGQAIVWVGPQEQAELNHEQLLRAGLTMAPLEPEGS

SEQ ID NO: 6216 - protein, 95 aa, Thermosynechococcus elongatus
ASVVPQERQQVTRKHYPNYKVIVLNDDFNTFRHVAACLMKYIPDMTSDRAWELTNQVHYKGQAIVWVGPQEQAELNHEQLLRAGLTMAPLEPEGS

SEQ ID NO: 6217 - protein, 95 aa, Thermosynechococcus elongatus
ASVVPQERQQVTRKHYPNYKVIVLNDDFNTFRHVAACLMKYIPDMTSDRAWELTNQVHYKGQAIVWVGPQEQAELYHEQLLRAGLTMAPLEPEGS

SEQ ID NO: 6218 - protein, 95 aa, Thermosynechococcus elongatus; identical to SEQ ID NO: 25

SEQ ID NO: 6219 - protein, 59 aa, Thermosynechococcus elongatus; identical to SEQ ID NO: 5958

SEQ ID NO: 6220 - protein, 95 aa, Thermosynechococcus elongatus
ASVVPQERQQVTRKHYPNYKVIVLNDDFNTFRHVAACLMKYILNMTSDRAWELTNQVHYKGQAIVWVGPQEQAELNHEQLLRAGLTMAPLEPEGS

SEQ ID NO: 6221 - protein, 95 aa, Thermosynechococcus elongatus
ASVVPQERQQVTRKHYPNYKVIVLNDDFNTFRHVAACLMKYVPNMTSDRAWELTNQVHYEGQAIVWVGPQEQAELYHEQLLRAGLTMAPLEPEGS

SEQ ID NO: 6222 - protein, 95 aa, Thermosynechococcus elongatus
ASVVPQERQQVTRKHYPNYKVIVLNDDFNTFRHVAACLMKYVPNMTSDRAWELTNQVHYEGQAIVWVGPQVQAELYHEQLLRAGLTMAPLEPGGS

SEQ ID NO: 6223 - protein, 95 aa, Thermosynechococcus elongatus
ASVVPQERQQVTRKHYPNYKVIVLNDDFNTFRHVAACLMKYVPNMTSDRAWELTNQVHYKGQAIVWVGPQEQAELNHEQLLRAGLTMAPLEPEGS

SEQ ID NO: 6224 - protein, 95 aa, Thermosynechococcus elongatus; identical to SEQ ID NO: 5

SEQ ID NO: 6225 - protein, 95 aa, Thermosynechococcus elongatus
ASVVPQERQQVTRKHYPNYKVIVLNDDFNTFRHVAACLMKYIPNMTSDRAWELTNQVHYKGQAIVWVGPQEQAELNHEQLLRAGLTMAPLELEGS

SEQ ID NO: 6226 - protein, 73 aa, Thermosynechococcus elongatus
ASVVPQERQQVTRKHYPNYKVIVLNDDFNTFRHVAACLMKCIPNMTSDRAWELTNQVHYKGQAIVWVGPQEQA

SEQ ID NO: 6227 - protein, 95 aa, Thermosynechococcus elongatus
ASVVPQERQQVTRKHYPNYKVIVLNDDFNTFRHVAACLMTYIPNMTSDRAWELTNQVHYEGQAIVWVGPQEQAELYHEQLLRAGLTMAPLEPEGS

SEQ ID NO: 6228 - protein, 95 aa, Thermosynechococcus elongatus
ASVVPQERQQVTRKHYPNYKVIVLNDDFNTFRHVAACLMMYIPNMTSDRAWELTNQVHYKGQAIVWVGPQEQAELNHEQLLRAGLTMAPLEPEGS

SEQ ID NO: 6229 - protein, 95 aa, Thermosynechococcus elongatus
ASVVPQERQQVTRKHYPNYKVIVLNDDFNTFRHVAACLMEYIPNMTSDRAWELTNQVHYKGQAIVWVGPQEQAELNHEQLLRAGLTMAPLEPEGS

SEQ ID NO: 6230 - protein, 95 aa, Thermosynechococcus elongatus
ASVVPQERQQVTRKHYPNYKVIVLNDDFNTFRHVAACLIKYIPNMTSDRAWELTNKVHYKGQAIVWVGPQEQAELNHEQLLRAGLTMDQLEPVGS

SEQ ID NO: 6231 - protein, 95 aa, Thermosynechococcus elongatus
ASVVPQERQQVTRKHYPNYKVIVLNDDFNTFRHVAACLIKYIPNMTSDRAWELTNQVHYKGQAIVWVGPQEQAELNHEQLLRAGLTMAPLEPEGS

SEQ ID NO: 6232 - protein, 95 aa, Thermosynechococcus elongatus; identical to SEQ ID NO: 6231

SEQ ID NO: 6233 - protein, 95 aa, Thermosynechococcus elongatus
ASVVPQERQQVTRKHYPNYKVIVLNDDFNTFRHVAACLVKYIPNKTSDRAWELTNQVHYVGQAIVWVGPQERAELYHEQLLRAGLTMAPLEPEGS

SEQ ID NO: 6234 - protein, 58 aa, Thermosynechococcus elongatus
ASVVPQERQQVTRKHYPNYKVIVLNDDFNTFRHVAACLVKYIPNMTSDRAWELTNQVH

SEQ ID NO: 6235 - protein, 51 aa, Thermosynechococcus elongatus
ASVVPQERQQVTRKHYPNYKVIVLNDDFNTFRHVAACFMKYNPNMTSDRAW

SEQ ID NO: 6236 - protein, 95 aa, Thermosynechococcus elongatus
ASVVPQERQQVTRKHYPNYKVIVLNDDFNTFRHVAACFMKYIPNMTSDRAWELTNQVHYKGQAIVWVGPQEQAELNHEQLLRAGLTMAPLEPEGS

SEQ ID NO: 6237 - protein, 95 aa, Thermosynechococcus elongatus
ASVVPQERQQVTRKHYPNYKVIVLNDDFNTFRHVAAWLMKYIPNMTSDRAWELTNQVHYEGQAIVWVGPQEQAELYHEQLLRTGLTMAPLEPEGS

SEQ ID NO: 6238 - protein, 95 aa, Thermosynechococcus elongatus
ASVVPQERQQVTRKHYPNYKVIVLNDDFNTFRHVAAWLMKYIPNMTSDRAWELTNQVHYKGQAIVWVGPQEQAELNHEQLLRAGLTMAPLEPEGS

SEQ ID NO: 6239 - protein, 95 aa, Thermosynechococcus elongatus; identical to SEQ ID NO: 5

SEQ ID NO: 6240 - protein, 95 aa, Thermosynechococcus elongatus
ASVVPQERQQVTRKHYPNYKVIVLNDDFNTFRHVAAFLMKYIPNMTSDRAWELTNQVHYKGQAIVWVGPQEQAELNHEQLLRAGLTMAPLEPEGS

SEQ ID NO: 6241 - protein, 95 aa, Thermosynechococcus elongatus
ASVVPQERQQVTRKHYPNYKVIVLNDDFNTFRHVAAFLMKYIPNMTSDRAWELTNQVHYKGQAIVWVGPQEQAELYHEQLLRAGLTMAPLEPEGS

SEQ ID NO: 6242 - protein, 95 aa, Thermosynechococcus elongatus; identical to SEQ ID NO: 15

SEQ ID NO: 6243 - protein, 95 aa, Thermosynechococcus elongatus
ASVVPQERQQVTRKHYPNYKVIVLNDDFNTFRHVAACLMKYIPNMTSDRAWELTKQVHYKGQAIVWVGPQEQAELNHEQLLRAGLTMAPLEPEGS

SEQ ID NO: 6244 - protein, 95 aa, Thermosynechococcus elongatus
ASVVPQERQQVTRKHYPNYKVIVLNDDFNTFRHVAVCLMKYIPNMTSDRAWELTNQVHYKGQAIVWVGPQEQAELNHEQLLRAGLTMAPLEPEGS

SEQ ID NO: 6245 - protein, 95 aa, Thermosynechococcus elongatus
ASVVPQERQQVTRKHYPNYKVIVLNDDFNTFRHVASCLMKYIPNMTSDRAWELTNQVHYEGQAIVWVGPREQAELYHEQLLRVGLTMAPLEPEGS

SEQ ID NO: 6246 - protein, 95 aa, Thermosynechococcus elongatus
ASVVPQERQQVTRKHYPNYKVIVLNDDFNTFRHVASCLMKYIPNMTSDRAWELTNQVHYKGQAIVWVGPQEQAELNHEQLLRAGLTMAPLEPEGS

SEQ ID NO: 6247 - protein, 95 aa, Thermosynechococcus elongatus
ASVVPQERQQVTRKHYPNYKVIVLNDDFNTFRHVGACLMKYIPNMTSDRAWELTNQVHYEGQAIVWVGPREQAELYHEQLLRVGLTMAPLEPEGS

SEQ ID NO: 6248 - protein, 95 aa, Thermosynechococcus elongatus
ASVVPQERQQVTRKHYPNYKVIVLNDDFNTFRHVVACLKKYIPNMTSDRAWELTNQVHYEGQAIVWVGPQEQAELYHEQLLRAGLTMAPLEPEGS

SEQ ID NO: 6249 - protein, 95 aa, Thermosynechococcus elongatus
ASVVPQERQQVTRKHYPNYKVIVLNDDFNTFRHVVACLKKYIPNMISDRAWELTNQVHYKGQAIVWVGPQEQAELNHEQLLRAGLTMAPLEPEGS

SEQ ID NO: 6250 - protein, 95 aa, Thermosynechococcus elongatus
ASVVPQERQQVTRKHYPNYKVIVLNDDFNTFRHVVACLKKYIPNMISDRAWELTNQVHYGCRAIVWVGPQEQAELYHEQLLRAGLTMAPLEPEGS

SEQ ID NO: 6251 - protein, 95 aa, Thermosynechococcus elongatus
ASVVPQERQQVTRKHYPNYKVIVLNDDFNTFRHVVACLKKYIPNMTSDRAWELTNQVHYTGQAIVWVGPQEQAELNHEQLLRAGLTMAPLEPEGS

SEQ ID NO: 6252 - protein, 95 aa, Thermosynechococcus elongatus
ASVVPQERQQVTRKHYPNYKVIVLNDDFNTFRHVVACLMKYIPNMTSDRAWELTNQVHYGGRAIVWVGPQEQAELYHEQLLRAGLTMAPLEPEGS

SEQ ID NO: 6253 - protein, 95 aa, Thermosynechococcus elongatus
ASVVPQERQQVTRKHYPNYKVIVLNDDFNTFRHVVACLMKYIPNMTSDRAWELTNQVHYKGQAIVWVGPQEQAELNHEQLLRAGLTMAPLEPEGS

SEQ ID NO: 6254 - protein, 95 aa, Thermosynechococcus elongatus; identical to SEQ ID NO: 6253

SEQ ID NO: 6255 - protein, 95 aa, Thermosynechococcus elongatus
ASVVPQERQQVTRKHYPNYKVIVLNDDFNTFRHVVACLKKYIPNMISDRAWELTNQVHSGGRAIVWVGPQEQAELYHEQLLRAGLTMAPLEPEGS

SEQ ID NO: 6256 - protein, 36 aa, Thermosynechococcus elongatus
ASVVPQERQQVTRKHYPNYKVIVLNDDFNTFRHFAA

SEQ ID NO: 6257 - protein, 95 aa, Thermosynechococcus elongatus
ASVVPQERQQVTRKHYPNYKVIVLNDDFNTFRHFAACLKKYIPNMISDRAWELTNQVHYGGRAIVWVGPQEQAELYHEQLLRAGLTMAPLEPEGS

SEQ ID NO: 6258 - protein, 95 aa, Thermosynechococcus elongatus
ASVVPQERQQVTRKHYPNYKVIVLNDDFNTFRHFAACLMKYIPNMTSDRAWELTNQVLYEGQAIVWVGPQVQAELYHEQLLRAGLTMAPLEPEGS

SEQ ID NO: 6259 - protein, 95 aa, Thermosynechococcus elongatus
ASVVPQERQQVTRKHYPNYKVIVLNDDFNTFRHFAACLMKYIPNMTSDRAWELTNQVHYKGQAIVWVGPQEQAELNHEQLLRAGLTMAPLEPEGS

SEQ ID NO: 6260 - protein, 95 aa, Thermosynechococcus elongatus
ASVVPQERQQVTRKHYPNYKVIVLNDDFNTFRHFAACLMKYIPNMTSDRAWELTNQVHYKGQAIVWVGPPEQAELNQEQLLRAGLTMAPLEPEGS

SEQ ID NO: 6261 - protein, 95 aa, Thermosynechococcus elongatus
ASVVPQERQQVTRKHYPNYKVIVLNDDFNTFRPVAACLMKYIPNMTSDRAWELTNQVHYEGQAIVWVGPQEQAELYHEQLLRAGLTMAPLEPEGS

SEQ ID NO: 6262 - protein, 95 aa, Thermosynechococcus elongatus
ASVVPQERQQVTRKHYPNYKVIVLNDDFNTFRLVAACLMKYIPNMTSDRAWELTNQVHYKGQAIVWVGPQEQAELNHEQLLRAGLTMAPLEPEGS

SEQ ID NO: 6263 - protein, 95 aa, Thermosynechococcus elongatus
ASVVPQERQQVTRKHYPNYKVIVLNDDFNTFRYVAACLMKYIPNMTSDRAWELTNQVHYEGQAIVWVGPQEQAELYHEQLLRAGLTMAPLEPEGS

SEQ ID NO: 6264 - protein, 95 aa, Thermosynechococcus elongatus
ASVVPQERQQVTRKHYPNYKVIVLNDDFNTFLHVDACLKKYIPNKISDRAWELTNQVHYVGLAIVWVGPQEQAELYHEQLLRAGLTMAPLEPEGS

SEQ ID NO: 6265 - protein, 95 aa, Thermosynechococcus elongatus
ASVVPQERQQVTRKHYPNYKVIVLNDDFNTFLHVAACLMKYIPNMTSDRAWELTNQVHYEGQAIVWVGPQEQAELYHEQLLRTGLTMAPLEPEGS

SEQ ID NO: 6266 - protein, 95 aa, Thermosynechococcus elongatus
ASVVPQERQQVTRKHYPNYKVIVLNDDFNTFLHVAACLMKYIPNMTSDRAWELTNQVHYKGQAIVWVGPQEQAELNHEQLLRAGLTMAPLEPEGS

SEQ ID NO: 6267 - protein, 31 aa, Thermosynechococcus elongatus
ASVVPQERQQVTRKHYPNYKVIVLNDDFNTF

SEQ ID NO: 6268 - protein, 95 aa, Thermosynechococcus elongatus
ASVVPQERQQVTRKHYPNYKVIVLNDDFNIFRHVAACLMKYIPNMTSDRAWELTNQVHYEGQAIVWVGPQEQAELYHEQLLRAGLTMAPLEPEGS

SEQ ID NO: 6269 - protein, 95 aa, Thermosynechococcus elongatus
ASVVPQERQQVTRKHYPNYKVIVLNDDFNIFRHVAACLMKYIPNMTSDRAWELTNQVHYEGQAIVWVGPREQAELYHEQLLRVGLTMAPLEPEGS

SEQ ID NO: 6270 - protein, 95 aa, Thermosynechococcus elongatus
ASVVPQERQQVTRKHYPNYKVIVLNDDFNAFRHVAACLMKYIPNMTSDRAWELTNQVHYEGQAIVWVGPQVQAELYHEQLLRAGLTMAPLEPGGS

SEQ ID NO: 6271 - protein, 95 aa, Thermosynechococcus elongatus; identical to SEQ ID NO: 91

SEQ ID NO: 6272 - protein, 95 aa, Thermosynechococcus elongatus; identical to SEQ ID NO: 5

SEQ ID NO: 6273 - protein, 95 aa, Thermosynechococcus elongatus
ASVVPQERQQVTRKHYPNYKVIVLNDDFITFQHVVACLKKYIPNMISDRAWELTNQVHYGGRAIVWVGPQEQAELYHEQLLRAGLTMAPLEPEGS

SEQ ID NO: 6274 - protein, 95 aa, Thermosynechococcus elongatus
ASVVPQERQQVTRKHYPNYKVIVLNDDFITFRHVAACLMKYIPNMTSDRAWELTNQVHYEGQAIVWVGPQEQAELYHEQLLRTGLTMAPLEPEGS

SEQ ID NO: 6275 - protein, 95 aa, Thermosynechococcus elongatus
ASVVPQERQQVTRKHYPNYKVIVLNDDFITFRHVAACLMKYIPNMTSDRAWELTNQVHYKGQAIVWVGPQEQAELNHEQLLRAGLTMAPLEPEGS

SEQ ID NO: 6276 - protein, 95 aa, Thermosynechococcus elongatus
ASVVPQERQQVTRKHYPNYKVIVLNDDFITFRHVAACLMKYIPNMTSDRAWELTNQVHYKGQAIVWVGPQEQAELYHEQLLRAGLTIAPLEPEGS

SEQ ID NO: 6277 - protein, 95 aa, Thermosynechococcus elongatus
ASVVPQERQQVTRKHYPNYKVIVLNDDFITFRHVAACLMKYIPNKTSDRAWELTNQVHYEGQAIVWVGPQEQAELYHEQLLRAGLSMAPLEPEGS

SEQ ID NO: 6278 - protein, 95 aa, Thermosynechococcus elongatus
ASVVPQERQQVTRKHYPNYKVIVLNDDFHTFQHVVACLKKYIPNMISDRAWELTNQVHYGGRAIVWVGPQEQAELYHEQLLRAGLTMAPLEPEGS

SEQ ID NO: 6279 - protein, 95 aa, Thermosynechococcus elongatus
ASVVPQERQQVTRKHYPNYKVIVLNDDFDTFRHVAACLMKYIPNKTSDRAWELTNQVHYEGQAIVWVGPQEQAELYHEQLLRAGLTMAPLEPEGS

SEQ ID NO: 6280 - protein, 95 aa, Thermosynechococcus elongatus
ASVVPQERQQVTRKHYPNYKVIVLNDDFDTFRHVAACLMKYIPNMTSDRAWELTNQVHYKGQAIVWVGPQEQAELNHEQLLRAGLTMAPLEPEGS

SEQ ID NO: 6281 - protein, 95 aa, Thermosynechococcus elongatus
ASVVPQERQQVTRKHYPNYKVIVLNDDFDTFRHVAACLMKYIPNMTSDRAWELTNQVHYKGQAIVWVGPQEQAELYHEQLLRTGLTMAPLEPEGS

SEQ ID NO: 6282 - protein, 95 aa, Thermosynechococcus elongatus
ASVVPQERQQVTRKHYPNYKVIVLNDDFYTFRHVAACLMKYIPNMTSDRAWELTNQVHYEGQAIVWVGPQEQAELYHEQLLRAGLTMAPLEPEGS

SEQ ID NO: 6283 - protein, 95 aa, Thermosynechococcus elongatus
ASVVPQERQQVTRKHYPNYKVIVLNDDFNTFQHVAACLMKYIPNMTSDRAWELTNQVHYEGQAIVWVGPQEQAELYHEQLLRAGLTIAPLEPEGS

SEQ ID NO: 6284 - protein, 95 aa, Thermosynechococcus elongatus; identical to SEQ ID NO: 25

SEQ ID NO: 6285 - protein, 95 aa, Thermosynechococcus elongatus
ASVVPQERQQVTRKHYPNYKVIVLNDDFNTFRHVVACLKKYIPNMTSDRAWELTNQVHYEGQAIVWVGPQVQAELYHEQLLRAGLTMAPLEPGGS

SEQ ID NO: 6286 - protein, 95 aa, Thermosynechococcus elongatus
ASVVPQERQQVTRKHYPNYKVIVLNDDFNTFRHVVACLMKYIPNKTSDRAWELTNQVHYEGQAIVWVGPQEQAELYHEQLLRAGLTMAPLEPEGS

SEQ ID NO: 6287 - protein, 95 aa, Thermosynechococcus elongatus
ASVVPQERQQVTRKHYPNYKVIVLNDGFNTFRHVAACLMKYIPNMTSDRAWELTNQVHYEGQAIVWVGPREQAELYHEQLLRVGLTMAPLEPEGS

SEQ ID NO: 6288 - protein, 95 aa, Thermosynechococcus elongatus
ASVVPQERQQVTRKHYPNYKVIVLNDVFNTYRHVAACLMKYIPNMTSDRAWELTNQVHYKGQAIVWVGPQEQAELNHEQLLRAGLTMAPLEPEGS

SEQ ID NO: 6289 - protein, 95 aa, Thermosynechococcus elongatus
ASVVPQERQQVTRKHYPNYKVIVLNDYFNTFQHVVACLKKYIPNMISDRAWELTNQVHYGGRAIVWVGPQEQAELYHEQLLRAGLTMAPLEPEGS

SEQ ID NO: 6290 - protein, 95 aa, Thermosynechococcus elongatus
ASVVPQERQQVTRKHYPNYKVIVLNDYFNTFRHVAACLMKYIPNKTSDRAWELTNQFHYEGQAIVWVGPQEQAELYHEQLLRAGLTIAPLEPEGS

SEQ ID NO: 6291 - protein, 95 aa, Thermosynechococcus elongatus
ASVVPQERQQVTRKHYPNYKVIVLNDYFNTFRHVAACLMKYIPNMTSDRAWELTNQVHYEGQAIVWVGPQEQAELYHEQLLRAGLTMAPLEPKGS

SEQ ID NO: 6292 - protein, 95 aa, Thermosynechococcus elongatus
ASVVPQERQQVTRKHYPNYKVIVLNDYFNTFRHVAACLMKYIPNMTSDRAWELTNQVHYEGQAIVWVGPQEQAELYHEQLLRAGLTMAPLEPEGS

SEQ ID NO: 6293 - protein, 95 aa, Thermosynechococcus elongatus
ASVVPQERQQVTRKHYPNYKVIVLNDYFNTFRHVAACLMKYIPNMTSDRAWELTNQVHYEGQAIVWVGPQEQAELNHEQLLRAGLTMAPLEPEGS

SEQ ID NO: 6294 - protein, 95 aa, Thermosynechococcus elongatus
ASVVPQERQQVTRKHYPNYKVIVLNDYFNTFRHVAACLMKYIPNMTSYRAWELTNQVHYKGQAIVWVGPQEQAELNHEQLLRAGLTMAPLEPGGS

SEQ ID NO: 6295 - protein, 95 aa, Thermosynechococcus elongatus
ASVVPQERQQVTRKHYPNYKVIVLNYDFNTIRHVAACLMKYIPNMTSDRACELTNQVLYKGQAIVWVGPQEQAELNHEQLLRAGLTMAPLEPEGS

SEQ ID NO: 6296 - protein, 95 aa, Thermosynechococcus elongatus
ASVVPQERQQVTRKHYPNYKVIVLNYDFNTFQHVVACLKKYIPNMISDRAWELTNQVHYGGRAIVWVGPQEQAELYHEQLLRAGLTMAPLEPEGS

SEQ ID NO: 6297 - protein, 95 aa, Thermosynechococcus elongatus
ASVVPQERQQVTRKHYPNYKVIVLNYDFNTFRHVAACLMKYIPNMTSDRAWELTNQVHYGGRAIVWVGPQEQAELYHEQLLRAGLTMAPLEPEGS

SEQ ID NO: 6298 - protein, 95 aa, Thermosynechococcus elongatus
ASVVPQERQQVTRKHYPNYKVIVLNYDFNTFRHVAACLMKYIPNMTSDRAWELTNQVHYKGQAIVWVGPQEQAELNHEQLLRAGLTIAPLEPEGS

SEQ ID NO: 6299 - protein, 95 aa, Thermosynechococcus elongatus
ASVVPQERQQVTRKHYPNYKVIVLTDDFNTFRHVAACLMKYIPNMTSDRAWELTNQVHYEGQAIVWVGPQEQAELYHEQLLRAGLTMAPLEPEGS

SEQ ID NO: 6300 - protein, 95 aa, Thermosynechococcus elongatus
ASVVPQERQQVTRKHYPNYKVIVLSDDFNTFQHVVACLKKYIPNMTSDRAWELTNQVHYEGQAIVWVGPQEQAELYHEQLLRAGLTMAPLEPEGS

SEQ ID NO: 6301 - protein, 70 aa, Thermosynechococcus elongatus
ASVVPQERQQVTRKHYPNYKVIVLSDDFNTFQHVVACLKKYIPNMISDRAWELTNQVHYGGRAIVWVGPQ

SEQ ID NO: 6302 - protein, 95 aa, Thermosynechococcus elongatus
ASVVPQERQQVTRKHYPNYKVIVLDDDFNTFRHVAACLMKYIPNMTSDRAWELTNQVHYKGQAIVWVGPQEQAELNHEQLLRAGLTMAPLEPEGS

SEQ ID NO: 6303 - protein, 95 aa, Thermosynechococcus elongatus
ASVVPQERQQVTRKHYPNYKVIVFNDDFNTFRHVAACLMKYIPNMTSDRAWELTNQVHYEGQAIVWVGPREQAELYHEQLLRVGLTMAPLEPEGS

SEQ ID NO: 6304 - protein, 95 aa, Thermosynechococcus elongatus
ASVVPQERQQVTRKHYPNYKVIVFNDDFNTFRHVAACLMKYIPNMTSDRAWELTNQVHYKGQAIVWVGPQEQAELYHEQLLRAGLTMAPLEPEGS

SEQ ID NO: 6305 - protein, 95 aa, Thermosynechococcus elongatus
ASVVPQERQQVTRKHYPNYKVIVLNDDFNTVRHVAACMMKYIPNMTSDRAWELTNQVHYKGQAIVWVGPQEQAELNHEQLLRAGLTMAPLEPEGS

SEQ ID NO: 6306 - protein, 95 aa, Thermosynechococcus elongatus
ASVVPQERQQVTRKHYPNYKVLVLNDDFNTFQHVVACLKKYIPNMISDRAWELTNQVHYGGRAIVWVGPQEQAELYHEQLLRAGLTMAPLEPEGS

SEQ ID NO: 6307 - protein, 95 aa, Thermosynechococcus elongatus
ASVVPQERQQVTRKHYPNYKVLVLNDDFNTFRHVAACLMKYIPNMTSDRAWELTNQVHYEGQAIVWVGPQEQAELYHEQLLRAGLTMAPLEPEGS

SEQ ID NO: 6308 - protein, 95 aa, Thermosynechococcus elongatus; identical to SEQ ID NO: 1796

SEQ ID NO: 6309 - protein, 95 aa, Thermosynechococcus elongatus
ASVVPQERQQVTRKHYPNYKFIVLNDDFNTFRHVDACLMKYIPNMTSDRAWELTNQVHYEGQAIVWVGPQEQAELYHEQLLRAGLTMAPLEPEGS

SEQ ID NO: 6310 - protein, 95 aa, Thermosynechococcus elongatus
ASVVPQERQQVTRKHYPNYKFIVLNDDFNTFRHVAACLIKYIPNMTSDRAWELTNQVHYEGQAIVWVGPQEQAELYHEQLLRAGLTMAPLEPGGS

SEQ ID NO: 6311 - protein, 95 aa, Thermosynechococcus elongatus
ASVVPQERQQVTRKHYPNYKFIVLNDDFNTFRHVAACLMKYIPNMTSDRAWELTNQVHYEGQAIVWVGPQEQAELYHEQLLRAGLTMAPLEPEGS

SEQ ID NO: 6312 - protein, 95 aa, Thermosynechococcus elongatus
ASVVPQERQQVTRKHYPNYKFIVLNDDFNTFRHVAACLMKYIPNMTSDRAWELTNQVHYKGQAIVWVGPQEQAELNHEQLLRAGLTMAPLEPEGS

SEQ ID NO: 6313 - protein, 95 aa, Thermosynechococcus elongatus
ASVVPQERQQVTRKHYPNYNDIVLNDDFNTFRHVAACLMKYIPKMTSDRAWELTNQVHYLGQAIVWVGPQEQAELNHEQLLRAGLTMATLEPEGS

SEQ ID NO: 6314 - protein, 95 aa, Thermosynechococcus elongatus
ASVVPQERQQVTRKHYPNYNVIVLNDDFNTFRHVAACLMKYIPNMTSDRAWELTNQVHYKGQAIVWVGPQEQAELNHEQLLRAGLTMAPLEPEGS

SEQ ID NO: 6315 - protein, 95 aa, Thermosynechococcus elongatus
ASVVPQERQQVTRKHYPNYNVIVLNDDFNTFRHVAACLMKYIPNMTSDRAWELTNQVHYKGQAIVWVGPQEQAELYHEQLLRAGLTMAPLEPEGS

SEQ ID NO: 6316 - protein, 95 aa, Thermosynechococcus elongatus
ASVVPQERQQVTRKHYPNYNVIVLNDDFNTFRHVAACLMKYIPNMTSDRAWELTNQVHYEGQAIVWVGPQVQAELYHEQLLRAGLTMAPLEPGGS

SEQ ID NO: 6317 - protein, 95 aa, Thermosynechococcus elongatus
ASVVPQERQQVTRKHYPNYNVIVLNDDFNTFRHVAACLMKYIPNMTSDRAWELTNQVHFKGQAIVWVGPQEQAELNHEQLLRAGLTMAPLEPEGS

SEQ ID NO: 6318 - protein, 95 aa, Thermosynechococcus elongatus
ASVVPQERQQVTRKHYPNYTVIVLNDDFNTFRHVAACLMKYIPTMTSDRAWELTNQVHYDGQAIVWVGPQEQAELYHDQLLRAGLTMAPLEPEGS

SEQ ID NO: 6319 - protein, 95 aa, Thermosynechococcus elongatus
ASVVPQERQQVTRKHYPNYTVIVLNDDFNTFQHVVACLKKYIPNMISDRAWELTNQVHYGGRAIVWVGPQEQAELYHEQLLRAGLTMAPLEPEGS

SEQ ID NO: 6320 - protein, 95 aa, Thermosynechococcus elongatus
ASVVPQERQQVTRKHYPNYTVIVLNDDFNTFRHVAACLMKYIPNMTSDRAWELTNQVHYGGRAIVWVGPQEQAELYHEQLLRAGLTMAPLEPEGS

SEQ ID NO: 6321 - protein, 95 aa, Thermosynechococcus elongatus
ASVVPQERQQVTRKHYPNYRVIVLNDDFNTFRHVAACLMKYIPNMTSDRAWELTNQVHYKGQAIVWVGPQEQAELNHEQLLRAGLTMAPLEPEGS

SEQ ID NO: 6322 - protein, 95 aa, Thermosynechococcus elongatus
ASVVPQERQQVTRKHYPNYQVIVLNDDFNTFRHVAACLMKYIPNMTSDRAWELTNQVHYKGQAIVWVGPQEQAELNHEQLLRAGLTMAPLEPEGS

SEQ ID NO: 6323 - protein, 95 aa, Thermosynechococcus elongatus
ASVVPQERQQVTRKHYPNYQVIVLNDDFNTFRHVAACVMKYIPNMTSDRAWELTNQVHYEGQAIVWVGPQEQAELYHEQLLRAGLTMAPLEPEGS

SEQ ID NO: 6324 - protein, 95 aa, Thermosynechococcus elongatus
ASVVPQERQQVTRKHYPNYEVIVLNDDINTFRHVAACLMKYIPNMTSDRAWELTNQVHYKGQAIVWVGPQELAELNHEQLLRAGLTMAPLEPEGS

SEQ ID NO: 6325 - protein, 95 aa, Thermosynechococcus elongatus; identical to SEQ ID NO: 1090

SEQ ID NO: 6326 - protein, 18 aa, Thermosynechococcus elongatus
ASVVPQERQQVTRKHYPN

SEQ ID NO: 6327 - protein, 95 aa, Thermosynechococcus elongatus; identical to SEQ ID NO: 85

SEQ ID NO: 6328 - protein, 95 aa, Thermosynechococcus elongatus
ASVVPQERQQVTRKHYPNSKGIVLNDDFNTFRHVAACLMKYIPNMTSDRAWELTNQVHYGGRAIVWVGPQEQAELYHEQLLRAGLTMAPLEPEGS

SEQ ID NO: 6329 - protein, 73 aa, Thermosynechococcus elongatus
ASVVPQERQQVTRKHYPNSKVIVLNDDFYTFRHVAACLMKYIPNMTSDRAWELTNQVHYTGQASVWVGPQEQA

SEQ ID NO: 6330 - protein, 95 aa, Thermosynechococcus elongatus
ASVVPQERQQVTRKHYPNSKVIVLNDDFNTFRHVAACLMKYIPNMTSDRAWELTNQVHYEGQAIVWVGPQEQAELYHEQLLRTGLTMAPLEPEGS

SEQ ID NO: 6331 - protein, 95 aa, Thermosynechococcus elongatus
ASVVPQERQQVTRKHYPNFKVIVLNDDFNTFQHVVACLKKYIPNLISDRAWELTTHVHYEGQAIVWVGPQVQAELYHEQLLRAGLTMAPLEPEGS

SEQ ID NO: 6332 - protein, 95 aa, Thermosynechococcus elongatus
ASVVPQERQQVTRKHYPNYKVIVLNDDFNTFRHVAACLMKYIPNMTSDRAWELTNQVHYEGQAIIWVGPQEQAELYHEQLLRAGLTMAPLEPEGS

SEQ ID NO: 6333 - protein, 95 aa, Thermosynechococcus elongatus
ASVVPQERQQVTRKHYPNYKVIVLNDDFNTFRHVSACLMKYIPNMTSDRAWELTNQVHYKGQAIVWVGPQEQAELNHEQLLRAGLTMAPLEPEGS

SEQ ID NO: 6334 - protein, 95 aa, Thermosynechococcus elongatus
ASVVPQERQQVTRKHYPIYKVIVLNDDFNTFRHVAACLMKYIPNMTSDRAWELTNQVHYKGLAIVWVGPQEQAELNHEQLLRAGLTLAQLEPEGS

SEQ ID NO: 6335 - protein, 95 aa, Thermosynechococcus elongatus
ASVVPQERQQVTRKHYPIYKVIVLNDDFNTFRHVAACLKKYIPNKTSDRAWELTNHVHSQGQAIVWVGPQEQAELNHEHLLRAGLTMAPLEAEGS

SEQ ID NO: 6336 - protein, 95 aa, Thermosynechococcus elongatus
ASVVPQERQQVTRKHYPIYKVIVLNDDFNTFRHVAACLMKYIPNMTSDRAWELTNQVHYEGQAIVWVGPQEQAELYHEQLLRAGLTMAPLEPEGS

SEQ ID NO: 6337 - protein, 95 aa, Thermosynechococcus elongatus; identical to SEQ ID NO: 6336

SEQ ID NO: 6338 - protein, 95 aa, Thermosynechococcus elongatus
ASVVPQERQQVTRKHYPIYKVIVLNDDFNTFRHVAACLMKYIPNMTSDRAWELTNQVHYKGQAIVWAGPQEQAELNHEQLLRAGLTMAPLEPEGS

SEQ ID NO: 6339 - protein, 95 aa, Thermosynechococcus elongatus; identical to SEQ ID NO: 250

SEQ ID NO: 6340 - protein, 95 aa, Thermosynechococcus elongatus
ASVVPQERQQVTRKHYPNYKVIVLNEDFNTFRHVAACLMKYIPNMTSDRAWELTNQVHYKGQAIVWVGPQEQAELNHEQLLRAGLTMAPLEPEGS

SEQ ID NO: 6341 - protein, 95 aa, Thermosynechococcus elongatus
ASVVPQERQQVTRKHYPNYKIIVLNDDFNTFQHVAACLMKYIPNMTSDRAWELTNQVHYKGQAIVWVGPQEQAELNHEQLLRAGLTMAPLEPEGS

SEQ ID NO: 6342 - protein, 95 aa, Thermosynechococcus elongatus
ASVVPQERQQVTRKHYPNYKVIVLNDDFNTFQHVAACLMKYIPNMTSDRAWELTNQVHYKGQATVWVGPQKQAELYHEQLLRAGLTMAPLEPDGS

SEQ ID NO: 6343 - protein, 95 aa, Thermosynechococcus elongatus
ASVVPQERQQVTRKHYPNYKVIVLNDDFNTFQHVAACLMKYIPNMTSDRAWELTNQVHYKGQATVWVGPQKQAELYHEHLLRAGLTMAPLEPEGS

SEQ ID NO: 6344 - protein, 95 aa, Thermosynechococcus elongatus; identical to SEQ ID NO: 486

SEQ ID NO: 6345 - protein, 95 aa, Thermosynechococcus elongatus; identical to SEQ ID NO: 34

SEQ ID NO: 6346 - protein, 95 aa, Thermosynechococcus elongatus
ASVVPQERQQVTRKHYLNYKVIVLNDDFNTFRHVAACLMKYIPNMTSDRAWELTNQVHYKGQAIVWVGPQEQAELNHEQLLRAGLTMAPLEPEGS

SEQ ID NO: 6347 - protein, 95 aa, Thermosynechococcus elongatus
ASVVPQERQQVTRKHYSNYKVIVLNDDFNTFQHVAACLMKYIPNMTSDRAWELTNQVHYEGQAIVWVGPQEQAELYHEQLLRAGLTMAPLEPEGS

SEQ ID NO: 6348 - protein, 95 aa, Thermosynechococcus elongatus
ASVVPQERQQVTRKHYSNYKVIVLNDDFNTFQHVAACLMKYIPNMTSDRAWELTNQVHYEGQAIVWVAPQEQAELYHKQLLRAGLTMATLEPEGS

SEQ ID NO: 6349 - protein, 95 aa, Thermosynechococcus elongatus
ASVVPQERQQVTRKHYSNYKVIVLNDDFNTFQHVAACLMKYIPNMTSDRAWELTNQVHYEGQAIVWVGPQEQAELYHKQLLRAGLTMAPLEPEGS

SEQ ID NO: 6350 - protein, 95 aa, Thermosynechococcus elongatus; identical to SEQ ID NO: 6347

SEQ ID NO: 6351 - protein, 95 aa, Thermosynechococcus elongatus
ASVVPQERQQVTRKHYSNYKVIVLNDDFNTFQHVAACLMKYIPNMTSDRAWELTNQVHYGGRAIVWVGPQEQAELYHEQLLRAGLTMAPLEPEGS

SEQ ID NO: 6352 - protein, 95 aa, Thermosynechococcus elongatus
ASVVPQERQQVTRKHYSNYKVIVLNDDFNTFRHVAACLMKYIPNMTSDRAWELTNQVHYKGQAIVWVGPQEQAELNHEQLLRAGLTMAPLEPEGS

SEQ ID NO: 6353 - protein, 95 aa, Thermosynechococcus elongatus
ASVVPQERQQVTRKHYSNYKVIVLNDDFNTFRHVAACLMKYIPNMTSDRAWELTNQVHYKGQAIVWVGPQEQAELYHEQLLRAGLTMAPLEPEGS

SEQ ID NO: 6354 - protein, 15 aa, Thermosynechococcus elongatus
ASVVPQERQQVTRKH

SEQ ID NO: 6355 - protein, 95 aa, Thermosynechococcus elongatus; identical to SEQ ID NO: 5

SEQ ID NO: 6356 - protein, 95 aa, Thermosynechococcus elongatus
ASVVPQERQQVTRKHCPNYKVIVLNDDFNTFRHVAACLMKYIPNMTSDRAWELTNQVHYKGQAIVWVGPQEQAELNHEQLLRAGLTMAPLEPEGS

SEQ ID NO: 6357 - protein, 95 aa, Thermosynechococcus elongatus; identical to SEQ ID NO: 5324

SEQ ID NO: 6358 - protein, 95 aa, Thermosynechococcus elongatus; identical to SEQ ID NO: 5

SEQ ID NO: 6359 - protein, 95 aa, Thermosynechococcus elongatus
ASVVPQERQQVTRKPYPNYKVIVLNDDFNTFRHVAACLMKYIPNMTSDRAWELTNQVHYGGRAIVWVGPQEQAELYHEQLLRAGLTMAPLEPEGS

SEQ ID NO: 6360 - protein, 95 aa, Thermosynechococcus elongatus
ASVVPQERQQVTRKRYPNYMVIVLNDDFNTFRHVAACLMKYIPNMTSDRAWELTNQVHYKGQAIVWVGPQEQAELNHEQLLRAGLTMAPLEPEGS

SEQ ID NO: 6361 - protein, 95 aa, Thermosynechococcus elongatus
ASVVPQERQQVTRKLYPNYKVIVLNDDFNTFRHVAACLMKYIPNMTSDRAWELTNQVHYEGQAIVWVGPQVQAELYHEQLLRAGLTMAPLEPEGS

SEQ ID NO: 6362 - protein, 95 aa, Thermosynechococcus elongatus
ASVVPQERQQVTRKYHPNYKVIVLNDDFNTFRHVAACLMKYIPNMTSDRAWELTNQVHYEGQAIVWVGPQEQAELYHEQLLRAGLTMAPLEPEGS

SEQ ID NO: 6363 - protein, 95 aa, Thermosynechococcus elongatus
ASVVPQERQQVTRKYYPNYKVIVLNDDFNTFRHVAACLMKYIPNMTSDRAWELTNQVHYKGQAIVWVGPQEQAELNHEQLLRAGLTMAPLEPEGS

SEQ ID NO: 6364 - protein, 95 aa, Thermosynechococcus elongatus; identical to SEQ ID NO: 5321

SEQ ID NO: 6365 - protein, 95 aa, Thermosynechococcus elongatus
ASVVPQERQQVTRNHYPNYKVIVLNDDFNTFQHVVACLKKYIPNMISDRAWELTNQVHYGGRAIVWVGPQEQAELYHEQLLRAGLTMAPLEPEGS

SEQ ID NO: 6366 - protein, 95 aa, Thermosynechococcus elongatus
ASVVPQERQQVTRNHYPNYKVIVLNDDFNTFRHVAACLKKYIPNMISDRAWELTNQVHYGGRAIVWVGPQEQAELYHEQLLRAGLTMAPLEPEGS

SEQ ID NO: 6367 - protein, 95 aa, Thermosynechococcus elongatus
ASVVPQERQQVTRNHYPNYKVIVLNDDFNTFRHVAACLMKYIPNKTSDRAWELTIQVHFEGQAIVWVGPQVQAELYHEQLLRAGLSLAPLEAGGS

SEQ ID NO: 6368 - protein, 95 aa, Thermosynechococcus elongatus
ASVVPQERQQVTRNHYPNYKVIVLNDDFNTFRHVAACLMKYIPNMTSDRAWELTNQVHYEGQAIVWVGPQEQAELYHEQLLRAGLTMAPLEPEGS

SEQ ID NO: 6369 - protein, 95 aa, Thermosynechococcus elongatus; identical to SEQ ID NO: 6368

SEQ ID NO: 6370 - protein, 95 aa, Thermosynechococcus elongatus
ASVVPQERQQVTRNHYPNYKVIVLNDDFNTFRHVAACLMKYIPNMTSDRAWELTNQVHYEGQAIVWVGPQVQAELYHEQLLRAGLTMAPLEPGGS

SEQ ID NO: 6371 - protein, 95 aa, Thermosynechococcus elongatus
ASVVPQERQQVTRTHHPNYKVIVLNDDFNTFRHVAACLMKYIPNMTSDRAWELTNQVHYEGQAIVWVGPQEQAELYHEQLLRAGLTMAPLEPEGS

SEQ ID NO: 6372 - protein, 95 aa, Thermosynechococcus elongatus
ASVVPQERQQVTRMHYPNYKVIVLNDDFNTFRHVAACLMKYIPNMTSDRAWELTNQVHYKGQAIVWVGPQEQAELNHEQLLRAGLTMAPLEPEGS

SEQ ID NO: 6373 - protein, 95 aa, Thermosynechococcus elongatus
ASVVPQERQQVTRMHYPNYKVIVLNDDFNTFRDVAACLMKYIPNMTSDRAWELTNQVHYEGQAIDWVGPQEQAELYHEQLLRAGLTMAPLEPEGS

SEQ ID NO: 6374 - protein, 95 aa, Thermosynechococcus elongatus
ASVVPQERQQVTRQHYPNYKVIVLNDDFNTFQHVVACLKKYIPNMISDRAWELTNQVHYGGRAIVWVGPQEQAELYHEQLLRAGLTMAPLEPEGS

SEQ ID NO: 6375 - protein, 95 aa, Thermosynechococcus elongatus
ASVVPQERQQVTRQHYPNSKVLVLNDDFNTFRHVAACLMKYIPNMTSDRAWELTNQVHYTGQAIVWVGPQEQAELNHEQLLRAGLTMAPLEPEGS

SEQ ID NO: 6376 - protein, 13 aa, Thermosynechococcus elongatus
ASVVPQERQQVTR

SEQ ID NO: 6377 - protein, 95 aa, Thermosynechococcus elongatus
ASVVPQERQQVTSKQYPNYKVIVLNDDFNTFRHVAACLMKYIPNMTSDRAWELTNQVHYKGQAIVWVGPQEQAELNHEQLLRAGLTMAPLEPEGS

SEQ ID NO: 6378 - protein, 40 aa, Thermosynechococcus elongatus
ASVVPQERQQVTSKHYQNYKVIVLNDDFNTFRHVAACLMK

SEQ ID NO: 6379 - protein, 95 aa, Thermosynechococcus elongatus
ASVVPQERQQVTSKHYPNYKDIVLNDDFNTFRHVAACLMKYIPNMTSDRAWELTNQVHYEGQAIVWVGPQEQAELYHEQLLRAGLTMAPLEPEGS

SEQ ID NO: 6380 - protein, 95 aa, Thermosynechococcus elongatus
ASVVPQERQQVTSKHYPNYKGIVLNDDFNTFRHVAACLMKYIPNMTSDRAWELTNQVHYEGQAIVWVGPQEQAELYHEQLLRAGLTMAPLEPEGS

SEQ ID NO: 6381 - protein, 95 aa, Thermosynechococcus elongatus
ASVVPQERQQVTSKHYPNYKVIVLNDDFNTFRHVAACLMKYIPNKTSDRAWELTNQVHYEGQAIVWVGPQVQAELYHEQLLRAGLTMAPLEPEGS

SEQ ID NO: 6382 - protein, 95 aa, Thermosynechococcus elongatus
ASVVPQERQQVTSKHYPNYKVIILNDDFNTFQHVAACLMKCIPNMTSDRAWELTNQVHYEGQAIVWVGPQVQAELYHEQLLRAGLTMAPLEPGGS

SEQ ID NO: 6383 - protein, 95 aa, Thermosynechococcus elongatus
ASVVPQERQQVTSKHYPNYKVIVLNDDLNTFRHVAACLMKYIPNMTSDRAWELTNQVHYEGQAIVWVGPQEQAELYHEQLLRAGLTMAPLEPEGS

SEQ ID NO: 6384 - protein, 95 aa, Thermosynechococcus elongatus
ASVVPQERQQVTSKHYPNYKVIVLNDDFNTIRHVAACLMKYIPNMTSDRAWELTNQVHYEGQAIVWVGPQEQAELYHEQLLRAGLTLAPLEPEGS

SEQ ID NO: 6385 - protein, 95 aa, Thermosynechococcus elongatus
ASVVPQERQQVTSKHYPNYKVIVLNDDFNTFQHVAACLMKYIPNMTSDRAWELTNQVHYVGQAIVWVGPQEQAELYHEQLLRAGLTMAPLEPEGS

SEQ ID NO: 6386 - protein, 95 aa, Thermosynechococcus elongatus
ASVVPQERQQVTSKHYPNYKVIVLNDDFNTFQHVAACLMKYIPNMISDRAWELTNQVHYGGRAIVWVGPQEQAELYHEQLLRAGLTMAPLEPEGS

SEQ ID NO: 6387 - protein, 95 aa, Thermosynechococcus elongatus; identical to SEQ ID NO: 1091

SEQ ID NO: 6388 - protein, 95 aa, Thermosynechococcus elongatus
ASVVPQERQQVTSKHYPNYKVIVLNDDFNTFRHDAACLMKYIPNMTSDRAWELTNQVHYEGQAIVWVGPQEQAELYHEQLLRAGLTMAPLEPEGS

SEQ ID NO: 6389 - protein, 58 aa, Thermosynechococcus elongatus
ASVVPQERQQVTSKHYPNYKVIVLNDDFNTFRHVAACLMKYIPNMTSDRAWELTNQVH

SEQ ID NO: 6390 - protein, 58 aa, Thermosynechococcus elongatus; identical to SEQ ID NO: 6389

SEQ ID NO: 6391 - protein, 95 aa, Thermosynechococcus elongatus; identical to SEQ ID NO: 1802

SEQ ID NO: 6392 - protein, 77 aa, Thermosynechococcus elongatus
ASVVPQERQQVTSKHYPNYKVIVLNDDFNTFRHVAACLMKYIPNMTSDRAWELTNQVHYEGQAIVWVGPQEQAELYH

SEQ ID NO: 6393 - protein, 95 aa, Thermosynechococcus elongatus
ASVVPQERQQVTSKHYPNYKVIVLNDDFNTFRHVAACLMKYIPNMTSDRAWELTNQVHYEGQAIVWVGPQEQAELNHEQLLRAGLTMAPLEPEGS

SEQ ID NO: 6394 - protein, 95 aa, Thermosynechococcus elongatus
ASVVPQERQQVTSKHYPNYKVIVLNDDFNTFRHVAACLMKYIPNMTSDRAWELTNQVHYEGQAIVWVGPQEQAELYQEQLLRAGLTMAPLEPEGS

SEQ ID NO: 6395 - protein, 95 aa, Thermosynechococcus elongatus; identical to SEQ ID NO: 65

SEQ ID NO: 6396 - protein, 95 aa, Thermosynechococcus elongatus; identical to SEQ ID NO: 65

SEQ ID NO: 6397 - protein, 95 aa, Thermosynechococcus elongatus
ASVVPQERQQVTSKHYPNYKVIVLNDDFNTFRHVAACLMKYIPNMTSDRAWELTNQVHYEGQAIVWVGPQEQAELYHEHLLRAGLTMAPLEPEGS

SEQ ID NO: 6398 - protein, 95 aa, Thermosynechococcus elongatus
ASVVPQERQQVTSKHYPNYKVIVLNDDFNTFRHVAACLMKYIPNMTSDRAWELTNQVHYEGQAIVWVGPQEQAELYHGQLLRAGLTMAPLEPEGS

SEQ ID NO: 6399 - protein, 95 aa, Thermosynechococcus elongatus
ASVVPQERQQVTSKHYPNYKVIVLNDDFNTFRHVAACLMKYIPNMTSDRAWELTNQVHYEGQAIVWVGPQEQAELYPEQLLRAGLTMAPLEPEGS

SEQ ID NO: 6400 - protein, 95 aa, Thermosynechococcus elongatus
ASVVPQERQQVTSKHYPNYKVIVLNDDFNTFRHVAACLMKYIPNMTSDRAWELTNQVHYEGQAIVWVGPQVQAELYHEQLLRAGLTMAPLEPEGS

SEQ ID NO: 6401 - protein, 95 aa, Thermosynechococcus elongatus; identical to SEQ ID NO: 6400

SEQ ID NO: 6402 - protein, 95 aa, Thermosynechococcus elongatus
ASVVPQERQQVTSKHYPNYKVIVLNDDFNTFRHVAACLMKYIPNMTSDRAWELTNQVHYGGRAIVWVGPQEQAELYHEQSLRAGLTMAPLEPEGS

SEQ ID NO: 6403 - protein, 95 aa, Thermosynechococcus elongatus
ASVVPQERQQVTSKHYPNYKVIVLNDDFNTFRHVAACLMKYIPNMTSDRAWDLTNQVHYEGQAIVWVGPQVQAELYHEQLLRAGLTLAPLEPGGS

SEQ ID NO: 6404 - protein, 95 aa, Thermosynechococcus elongatus
ASVVPQERQQVTSKHYPNYKVIVLNDDFNTFRHVAACLMKYIPNMTFDRAWELTNQVHYEGQAIVWVGPQEQAELYHEQLLRAGLTMAPLEPEGS

SEQ ID NO: 6405 - protein, 95 aa, Thermosynechococcus elongatus
ASVVPQERQQVTSKHYPNYKVIVLNDDFNTFRHVAACLMKYIPNMISDRAWELTNQVHYEGQAIVWVGPQVQAELYHEQLLRAGLTMAPLEPGGS

SEQ ID NO: 6406 - protein, 95 aa, Thermosynechococcus elongatus
ASVVPQERQQVTSKHYPNYKVIVLNDDFNTFRHVAACLMKYIPNMISDRAWELTNQVHYGGRAIVWVGPQEQAELYHEQLLRAGLTMAPLEPEGS

SEQ ID NO: 6407 - protein, 95 aa, Thermosynechococcus elongatus; identical to SEQ ID NO: 1802

SEQ ID NO: 6408 - protein, 95 aa, Thermosynechococcus elongatus; identical to SEQ ID NO: 65

SEQ ID NO: 6409 - protein, 95 aa, Thermosynechococcus elongatus
ASVVPQERQQVTSKHYPNYKVIVLNDDFNTFLHVAACLMKYIPNMTSDRAWELTNQVHYEGQAIVWVGPQEQAELYHEQLLRAGLTMAPLEPQGS

SEQ ID NO: 6410 - protein, 95 aa, Thermosynechococcus elongatus
ASVVPQERQQVTSKHYPNFKVIVLNDDFNTFRPVAACLMKYIPNMTSDRAWELTNQVHYEGQAIVWVGPQEQAELDHEHLLRAGLTMASLEPEGS

SEQ ID NO: 6411 - protein, 95 aa, Thermosynechococcus elongatus
ASVVPQERQQVTSKYYPNYKVIVLNDDFNTFRHVAACLMKYIPNMTSDRAWELTNQVHYEGQAIVWVGPQEQAELYHEQLLRAGLTMAPLEPEGS

SEQ ID NO: 6412 - protein, 95 aa, Thermosynechococcus elongatus
ASVVPQERQQVTSQHYPNSKVIVLNDDFNTFRHVAACLMKYITNMTSDRAWELTNQVHYEGQAIVCVGPQEQAELYPEQLLRAGLTMAPLEPEGS

SEQ ID NO: 6413 - protein, 95 aa, Thermosynechococcus elongatus
ASVVPQERQQVTIKHYPNYKVIVLNDDFNTIRHVAACLMKYIPNMTSDRAWELTNQVLYKCLAIVWVGPQDQAELNHEQLLRAGLTMAPLVPEGS

SEQ ID NO: 6414 - protein, 95 aa, Thermosynechococcus elongatus
ASVVPQERQQVTIKHYPNYKVIVLNDDFNTFQHVVACLKKYIPNMISDRAWELTNQVHYGGRAIVWVGPQEQAELYHEQLLRAGLTMAPLEPEGS

SEQ ID NO: 6415 - protein, 95 aa, Thermosynechococcus elongatus
ASVVPQERQQVTIKHYPNYKVIVLNDDFNTFRHVAACLMKYIPNMTSDRAWELTNQVHYEGQAIVWVGPREQAELYHEQLLRVGLTMAPLEPEGS

SEQ ID NO: 6416 - protein, 95 aa, Thermosynechococcus elongatus
ASVVPQERQQVTIKHYPNYKVIVLNDDFNTFRHVAACLMKYIPNMTSDRAWELTNQVHYEGQAIVWVGPQEQAELYHEQLLRAGLTMAPLEPEGS

SEQ ID NO: 6417 - protein, 95 aa, Thermosynechococcus elongatus; identical to SEQ ID NO: 34

SEQ ID NO: 6418 - protein, 95 aa, Thermosynechococcus elongatus
ASVVPQERQQVTRKHYPNYKVIVLNDDFNTFRHVAACLMKYIPNKTSDRAWELTNQVHYVGQAIVWVGPQERAELYHEQLLRAGLTMARLEREGS

SEQ ID NO: 6419 - protein, 95 aa, Thermosynechococcus elongatus; identical to SEQ ID NO: 73

SEQ ID NO: 6420 - protein, 95 aa, Thermosynechococcus elongatus
ASVVPQERQQVTRKHYPNYKVIVLNDDFNTFQHVVACLKKDIPNMISDRAWELTNQVHYGGRAIVWVGPQEQAELYHEQLLRAGLTMAPLEPEGS

SEQ ID NO: 6421 - protein, 95 aa, Thermosynechococcus elongatus; identical to SEQ ID NO: 13

SEQ ID NO: 6422 - protein, 95 aa, Thermosynechococcus elongatus; identical to SEQ ID NO: 13

SEQ ID NO: 6423 - protein, 59 aa, Thermosynechococcus elongatus
ASVVPQERQQVTRKHYPNYKVIVLNDDFNTFRHDAACLMKYIRNMTSDRAWELTNQVHY

SEQ ID NO: 6424 - protein, 95 aa, Thermosynechococcus elongatus; identical to SEQ ID NO: 1729

SEQ ID NO: 6425 - protein, 95 aa, Thermosynechococcus elongatus; identical to SEQ ID NO: 6008

SEQ ID NO: 6426 - protein, 95 aa, Thermosynechococcus elongatus; identical to SEQ ID NO: 141

SEQ ID NO: 6427 - protein, 95 aa, Thermosynechococcus elongatus; identical to SEQ ID NO: 6097

SEQ ID NO: 6428 - protein, 95 aa, Thermosynechococcus elongatus
ASVVPQERQQVTGKHYPNYKVIVLNDDFNTFRHVAACLMKYIPNMTSDRAWELTNQVHYKGRAIVWVGPQAQAELYHEQLLRAGLTMAPLEPEGS

SEQ ID NO: 6429 - protein, 95 aa, Thermosynechococcus elongatus
ASVVPQERQQVSRKHYPNYKVIVLNDDFNTFRHVAACLMKYIPNMTSDRAWELTNQVHYEGQAIVWVGPQEQAELYHEQLLRAGLTMAPLEPEGS

SEQ ID NO: 6430 - protein, 95 aa, Thermosynechococcus elongatus
ASVVPQERQQVPRKHHPNYKVIVLNDDFNTFRHVAAGLMQYIPNMTSDRAWELTTQDHYKGQAIVWVGPQEHAELNHDQLLRAGLTMAPLEPEGS

SEQ ID NO: 6431 - protein, 95 aa, Thermosynechococcus elongatus
ASVVPQERQQVPRKHHPNYKVIVLNDDFNTFRHVAACLMKYIPNMTSDRAWELTNQVHYEGQAIVWVGPQEQAELYHEQLLRAGLTMAPLEPEGS

SEQ ID NO: 6432 - protein, 59 aa, Thermosynechococcus elongatus
ASVVPQERQQVPRKHYPNYKVIVLNDDYNTFRHVAAWLMKYIPNMTSDRAWELTNQVLY

SEQ ID NO: 6433 - protein, 95 aa, Thermosynechococcus elongatus
ASVVPQERQQVPRKHYPNYKVIVLNDDFNTFRHVAACLMKYIPNMTSDRAWELTNQVHYEGQAIVWVGPQVQAELYHEQLLRAGLTMAPLEPGGS

SEQ ID NO: 6434 - protein, 95 aa, Thermosynechococcus elongatus
ASVVPQERQQVPRKHYPNYKVIVLNDDFNTFRHVAACLMKYIPNMTSDRAWELTNQVHYTGQAIVWVGPQEQAELNHEQLLRAGLTMAPLEPEGS

SEQ ID NO: 6435 - protein, 95 aa, Thermosynechococcus elongatus
ASVVPQERQQVPRKHYPNSKVIVLNDDFNTFRHVAACLMKYIPNMTSDRAWELTNQVHYKGQAIVWVGPQEQAELNHEQLLRAGLTMAPLEPEGS

SEQ ID NO: 6436 - protein, 95 aa, Thermosynechococcus elongatus
ASVVPQERQQVARKHHPNYKVIVLNDDFNTFRHVAACLMKYIPNMTSDRAWELTNQVHYEGQAIVWVGPQEQAELNHEQLLRAGLTMAPLEPEGS

SEQ ID NO: 6437 - protein, 95 aa, Thermosynechococcus elongatus
ASVVPQERQQVARKHYTNYKVIVLNDDFNTFRHVAACLMKYIPNMTSDRAWELTNQVHYKGQAIVWVGPREQAELNHEQLLRAGLTMAPLEPEGS

SEQ ID NO: 6438 - protein, 95 aa, Thermosynechococcus elongatus; identical to SEQ ID NO: 6

SEQ ID NO: 6439 - protein, 95 aa, Thermosynechococcus elongatus; identical to SEQ ID NO: 36

SEQ ID NO: 6440 - protein, 95 aa, Thermosynechococcus elongatus; identical to SEQ ID NO: 185

SEQ ID NO: 6441 - protein, 95 aa, Thermosynechococcus elongatus; identical to SEQ ID NO: 222

SEQ ID NO: 6442 - protein, 95 aa, Thermosynechococcus elongatus
ASVVPQERQQVARKHYPNYKVIVSNDDFNTFQHVAACLMKYIPNMTSDRAWELTNQVHYVGQAIVWVGPQEQAELYHEQLLRAGLTMAPLEPKGS

SEQ ID NO: 6443 - protein, 95 aa, Thermosynechococcus elongatus
ASVVPQERQQVARKHYPNYKVIVSNDDFNTFQHVAACLMKYIPNMTSDRAWELTNQVHYVGRAIVWVGPQEQAELYHEQLLRAGLTMAPLEPEGS

SEQ ID NO: 6444 - protein, 95 aa, Thermosynechococcus elongatus; identical to SEQ ID NO: 1244

SEQ ID NO: 6445 - protein, 95 aa, Thermosynechococcus elongatus
ASVVPQERQQVARKHYPNYKVIVLNDDFNTFKHVAACLMKYIPNMTSDRAWELTNQVHYVGQAIVWVGPQEQAELYHEQLLRAGLTMAPLEPKGS

SEQ ID NO: 6446 - protein, 77 aa, Thermosynechococcus elongatus
ASVVPQERQQVARKHYPNYKVIVLNDDFNTFQHVAASLMKYIPNMTSDRAWELTNQVHYVGQAIVWVCPQEQAELYH

SEQ ID NO: 6447 - protein, 95 aa, Thermosynechococcus elongatus
ASVVPQERQQVARKHYPNYKVIVLNDDFNTFQHVAAYLMKYITNMTSDRAWELTNQVHYVGQAIVWVGPQEQAELYHEQLLRAGLTMAPLEPKGS

SEQ ID NO: 6448 - protein, 95 aa, Thermosynechococcus elongatus
ASVVPQERQQVARKHYPNYKVIVLNDDFNTFQHVAACLMKYIPNKTSDRAWELTNQVHYEGQAIVWVGPQVQAELYHEQLLRAGLTMAPLEPGGS

SEQ ID NO: 6449 - protein, 95 aa, Thermosynechococcus elongatus
ASVVPQERQQVARKHYPNYKVIVLNDDFNTFQHVAACLMKYIPNKTSDRAWELTNQVHYEGQAIVLVGPQEQAELYHEQLLRAGLTMAPLEPEGS

SEQ ID NO: 6450 - protein, 95 aa, Thermosynechococcus elongatus
ASVVPQERQQVARKHYPNYKVIVLNDDFNTFQHVAACLMKYIPNMTSDRAWESTNQVHYVGQAIVWVGPQEQAELYHEQLLRAGLTMAPLEPKGS

SEQ ID NO: 6451 - protein, 95 aa, Thermosynechococcus elongatus
ASVVPQERQQVARKHYPNYKVIVLNDDFNTFQHVAACLMKYIPNMTSDRAWELTNQVNYVGQAIVWVGPQEQAELYHEQLLRAGLTMAPLEPKGS

SEQ ID NO: 6452 - protein, 95 aa, Thermosynechococcus elongatus
ASVVPQERQQVARKHYPNYKVIVLNDDFNTFQHVAACLMKYIPNMTSDRAWELTNQVQYVGQAIVCVGPQEQAELYHEQLLRAGLTMAPLEPKGS

SEQ ID NO: 6453 - protein, 58 aa, Thermosynechococcus elongatus
ASVVPQERQQVARKHYPNYKVIVLNDDFNTFQHVAACLMKYIPNMTSDRAWELTNQVH

SEQ ID NO: 6454 - protein, 58 aa, Thermosynechococcus elongatus; identical to SEQ ID NO: 6453

SEQ ID NO: 6455 - protein, 95 aa, Thermosynechococcus elongatus
ASVVPQERQQVARKHYPNYKVIVLNDDFNTFQHVAACLMKYIPNMTSDRAWELTNQVHYKGQAIVWVGPQEQAELYHEQLLRAGLTMAPLEPEGS

SEQ ID NO: 6456 - protein, 95 aa, Thermosynechococcus elongatus; identical to SEQ ID NO: 6455

SEQ ID NO: 6457 - protein, 95 aa, Thermosynechococcus elongatus
ASVVPQERQQVARKHYPNYKVIVLNDDFNTFQHVAACLMKYIPNMTSDRAWELTNQVHYEGQAIVRVGQQEQAELYHKQLLRAGLTMAPLEPEGS

SEQ ID NO: 6458 - protein, 95 aa, Thermosynechococcus elongatus; identical to SEQ ID NO: 222

SEQ ID NO: 6459 - protein, 95 aa, Thermosynechococcus elongatus
ASVVPQERQQVARKHYPNYKVIVLNDDFNTFQHVAACLMKYIPNMTSDRAWELTNQVHYEGQAIVWVGPQVQAELYHEQLLRAGLTMAPLEPEGS

SEQ ID NO: 6460 - protein, 95 aa, Thermosynechococcus elongatus
ASVVPQERQQVARKHYPNYKVIVLNDDFNTFQHVAACLMKYIPNMTSDRAWELTNQVHYEGQAIVWVGPREQAELYHEQLLRVGLTMAPLEPEGS

SEQ ID NO: 6461 - protein, 95 aa, Thermosynechococcus elongatus
ASVVPQERQQVARKHYPNYKVIVLNDDFNTFQHVAACLMKYIPNMTSDRAWELTNQVHYGGRAIVWVGPQEQAELYHEQLLRAGLTMAPLEPGGS

SEQ ID NO: 6462 - protein, 95 aa, Thermosynechococcus elongatus; identical to SEQ ID NO: 104

SEQ ID NO: 6463 - protein, 95 aa, Thermosynechococcus elongatus
ASVVPQERQQVARKHYPNYKVIVLNDDFNTFQHVAACLMKYIPNMTSDRAWELTNQVHYVGQAIVWVSPQEQAELYHEQLLRAGLTMAPLEPKGS

SEQ ID NO: 6464 - protein, 95 aa, Thermosynechococcus elongatus
ASVVPQERQQVARKHYPNYKVIVLNDDFNTFQHVAACLMKYIPNMTSDRAWELTNQVHYVGQAIVWVGPQEQAELNHEQLLRAGLTMAPLEPGGS

SEQ ID NO: 6465 - protein, 95 aa, Thermosynechococcus elongatus
ASVVPQERQQVARKHYPNYKVIVLNDDFNTFQHVAACLMKYIPNMTSDRAWELTNQVHYVGQAIVWVGPQEQAELYHEQLLRTGLTMAPLEPEGS

SEQ ID NO: 6466 - protein, 95 aa, Thermosynechococcus elongatus; identical to SEQ ID NO: 36

SEQ ID NO: 6467 - protein, 95 aa, Thermosynechococcus elongatus
ASVVPQERQQVARKHYPNYKVIVLNDDFNTFQHVAACLMKYIPNMTSDRAWELTNQVHYVGQAIVWVGPQEQAELYHEQLLRAGLTMATLEPKGS

SEQ ID NO: 6468 - protein, 95 aa, Thermosynechococcus elongatus
ASVVPQERQQVARKHYPNYKVIVLNDDFNTFQHVAACLMKYIPNMTSDRAWELTNQVHYVGQAIVWVGPQEQAELYHEQLLRAGLTMAPLVPEGS

SEQ ID NO: 6469 - protein, 90 aa, Thermosynechococcus elongatus
ASVVPQERQQVARKHYPNYKVIVLNDDFNTFQHVAACLMKYIPNMTSDRAWELTNQVHYVGQAIVWVGPQEQAELYHEQLLRAGLTMAPL

SEQ ID NO: 6470 - protein, 95 aa, Thermosynechococcus elongatus
ASVVPQERQQVARKHYPNYKVIVLNDDFNTFQHVAACLMKYIPNMTSDRAWELTNQVHYVGQAIVWVGPQEQAELYHEQLLRVGLTMAPLEPEGS

SEQ ID NO: 6471 - protein, 95 aa, Thermosynechococcus elongatus
ASVVPQERQQVARKHYPNYKVIVLNDDFNTFQHVAACLMKYIPNMTSDRAWELTNQVHYVGQAIVWVGPQEQAELYHEQLLIAGLTMAPLEPEGS

SEQ ID NO: 6472 - protein, 95 aa, Thermosynechococcus elongatus
ASVVPQERQQVARKHYPNYKVIVLNDDFNTFQHVAACLMKYIPNMTSDRAWELTNQVHYVGQAIVWVGPQEQAELYHEQLLIAGLTMAPLEPKGS

SEQ ID NO: 6473 - protein, 77 aa, Thermosynechococcus elongatus; identical to SEQ ID NO: 2541

SEQ ID NO: 6474 - protein, 95 aa, Thermosynechococcus elongatus
ASVVPQERQQVARKHYPNYKVIVLNDDFNTFQHVAACLMKYIPNMTSDRAWELTNQVHYVGQAIVWVGPQEQAELYPEQLLRAGLTMAPLEPKGS

SEQ ID NO: 6475 - protein, 95 aa, Thermosynechococcus elongatus
ASVVPQERQQVARKHYPNYKVIVLNDDFNTFQHVAACLMKYIPNMTSDRAWELTNQVHYVGQAIVWVGPQVQAELYHEQLLRAGLTMAPLEPEGS

SEQ ID NO: 6476 - protein, 95 aa, Thermosynechococcus elongatus
ASVVPQERQQVARKHYPNYKVIVLNDDFNTFQHVAACLMKYIPNMTSDRAWELTNQVHYVGQAIVLVGPQEQAELYHEQLLRAGLTMAPLEPKGS

SEQ ID NO: 6477 - protein, 95 aa, Thermosynechococcus elongatus
ASVVPQERQQVARKHYPNYKVIVLNDDFNTFQHVAACLMKYIPNMTSDRAWELTNQVHYVGRAIVWVGPQVQAELYHEQLLRAGLTMAPLEPEGS

SEQ ID NO: 6478 - protein, 95 aa, Thermosynechococcus elongatus
ASVVPQERQQVARKHYPNYKVIVLNDDFNTFQHVAACLMKYIPNMTSDRAWELTNQVHYVVQAIVWVGPQEQAELYHEQLLRAGLTMAPLEPKGS

SEQ ID NO: 6479 - protein, 95 aa, Thermosynechococcus elongatus
ASVVPQERQQVARKHYPNYKVIVLNDDFNTFQHVAACLMKYIPNMTSDRAWELTNQVHYLGQAIVWVGPQEQAELYHEQLLRAGLTMAPLEPEGS

SEQ ID NO: 6480 - protein, 95 aa, Thermosynechococcus elongatus
ASVVPQERQQVARKHYPNYKVIVLNDDFNTFQHVAACLMKYIPNMTSDRAWELTNQVHFVGQAIVWVGPQEQAELYHEQLLRAGLTMAPLEPGGS

SEQ ID NO: 6481 - protein, 51 aa, Thermosynechococcus elongatus
ASVVPQERQQVARKHYPNYKVIVLNDDFNTFQHVAACLMKYIPNMTSDRAW

SEQ ID NO: 6482 - protein, 50 aa, Thermosynechococcus elongatus
ASVVPQERQQVARKHYPNYKVIVLNDDFNTFQHVAACLMKYIPNMISDRA

SEQ ID NO: 6483 - protein, 95 aa, Thermosynechococcus elongatus; identical to SEQ ID NO: 1096

SEQ ID NO: 6484 - protein, 95 aa, Thermosynechococcus elongatus
ASVVPQERQQVARKHYPNYKVIVLNDDFNTFQHVAACLMKYIPNITSDRAWELTNQVHYVGQAIVWVGPQEQAELYHEQLLRAGLTMAPLEPKGS

SEQ ID NO: 6485 - protein, 95 aa, Thermosynechococcus elongatus
ASVVPQERQQVARKHYPNYKVIVLNDDFNTFQHVAAFLMKYIPNMTSDRAWELTNQVHYVGQAIVWVGPQEQAELYHEQLLRAGLTMAPLEPEGS

SEQ ID NO: 6486 - protein, 95 aa, Thermosynechococcus elongatus
ASVVPQERQQVARKHYPNYKVIVLNDDFNTFQHVVACLKKYIPNMTSDRAWELTNQVHYEGQAIVWVGPQVQAELYHEQLLRAGLTMAPLEPGGS

SEQ ID NO: 6487 - protein, 95 aa, Thermosynechococcus elongatus; identical to SEQ ID NO: 242

SEQ ID NO: 6488 - protein, 95 aa, Thermosynechococcus elongatus; identical to SEQ ID NO: 335

SEQ ID NO: 6489 - protein, 95 aa, Thermosynechococcus elongatus
ASVVPQERQQVARKHYPNYKVIVLNDDFNTFQHVVACLKKYIPNMISDRAWELTNQVHYGGRAIVWVGPQEQAELYPEQLLRAGLTMAPLEPEGS

SEQ ID NO: 6490 - protein, 95 aa, Thermosynechococcus elongatus
ASVVPQERQQVARKHYPNYKVIVLNDDFNTFQHFAACLMKYIPNMTSDIAWELTKQVHYVGLAIVCVGPQEQAELYQEQLLRAGLTMAPLEPEGS

SEQ ID NO: 6491 - protein, 95 aa, Thermosynechococcus elongatus
ASVVPQERQQVARKHYPNYKVIVLNDDFNTFQRVAACLMKYIPNMTSDRAWELTNQVHYVGQAIVWVGPQEQAELYHEQLLRAGLTMAPLEPKGS

SEQ ID NO: 6492 - protein, 95 aa, Thermosynechococcus elongatus
ASVVPQERQQVARKHYPNYKVIVLNDDFNTFQLVAACLMKYIPNMTSDRAWELTNQVHYVGQAIVWVGPQEQAELYHEQLLRAGLTMAPLEPKGS

SEQ ID NO: 6493 - protein, 95 aa, Thermosynechococcus elongatus
ASVVPQERQQVARKHYPNYKVIVLNDDFNTFRHGAACLMKYIPNMTSDRAWELTNHVHYEGQAIVWVGPQVQAELYHEQLLRAGLTMAPLEPGGS

SEQ ID NO: 6494 - protein, 95 aa, Thermosynechococcus elongatus; identical to SEQ ID NO: 9

SEQ ID NO: 6495 - protein, 95 aa, Thermosynechococcus elongatus
ASVVPQERQQVARKHYPNYKVIVLNDDFNTFRHVDACLKKYIPNMISDRAWELTNQVHYGGRAIVWVGPQEQAELYHEQLLRAGLTMAPLEPEGS

SEQ ID NO: 6496 - protein, 95 aa, Thermosynechococcus elongatus
ASVVPQERQQVARKHYPNYKVIVLNDDFNTFRHVDACLKKYIPKMISDRAWELTNQVHYGGRAIVWVGPQEQAELYHEQLLRAGLTMAPLEPEGS

SEQ ID NO: 6497 - protein, 95 aa, Thermosynechococcus elongatus
ASVVPQERQQVARKHYPNYKVIVLNDDFNTFRHVATCLMKYIPNMTSDRAWELTNQVHYGGRAIVWVGPQEQAELYHEQLLRAGLTMAPLEPEGS

SEQ ID NO: 6498 - protein, 95 aa, Thermosynechococcus elongatus; identical to SEQ ID NO: 62

SEQ ID NO: 6499 - protein, 95 aa, Thermosynechococcus elongatus
ASVVPQERQQVARKHYPNYKVIVLNDDFNTFRHVAACLMKYIPNKTSDRAWELTNQVHYEGQAIVWVGPQEQAELYHEQLLRASLTMAPLEPEGS

SEQ ID NO: 6500 - protein, 95 aa, Thermosynechococcus elongatus; identical to SEQ ID NO: 871

SEQ ID NO: 6501 - protein, 95 aa, Thermosynechococcus elongatus; identical to SEQ ID NO: 194

SEQ ID NO: 6502 - protein, 59 aa, Thermosynechococcus elongatus
ASVVPQERQQVARKHYPNYKVIVLNDDFNTFRHVAACLMKYIPNKTSDRAWELTNQVHY

SEQ ID NO: 6503 - protein, 77 aa, Thermosynechococcus elongatus
ASVVPQERQQVARKHYPNYKVIVLNDDFNTFRHVAACLMKYIPNKTSDRSWELTNQVHYEGQAIVWVGPQEQAELYH

SEQ ID NO: 6504 - protein, 95 aa, Thermosynechococcus elongatus
ASVVPQERQQVARKHYPNYKVIVLNDDFNTFRHVAACLMKYIPNMTSDRAWELTNQLHYEGQAIVWVGPQVQAELYHEQLLRAGLTMAPLEPGGS

SEQ ID NO: 6505 - protein, 95 aa, Thermosynechococcus elongatus
ASVVPQERQQVARKHYPNYKVIVLNDDFNTFRHVAACLMKYIPNMTSDRAWELTNQVHYKGQAIVWVGPQVQAELYHEQLLRAGLTMAPLEPEGS

SEQ ID NO: 6506 - protein, 95 aa, Thermosynechococcus elongatus; identical to SEQ ID NO: 143

SEQ ID NO: 6507 - protein, 95 aa, Thermosynechococcus elongatus; identical to SEQ ID NO: 96

SEQ ID NO: 6508 - protein, 95 aa, Thermosynechococcus elongatus; identical to SEQ ID NO: 66

SEQ ID NO: 6509 - protein, 95 aa, Thermosynechococcus elongatus; identical to SEQ ID NO: 6

SEQ ID NO: 6510 - protein, 95 aa, Thermosynechococcus elongatus; identical to SEQ ID NO: 3159

SEQ ID NO: 6511 - protein, 90 aa, Thermosynechococcus elongatus; identical to SEQ ID NO: 309

SEQ ID NO: 6512 - protein, 95 aa, Thermosynechococcus elongatus
ASVVPQERQQVARKHYPNYKVIVLNDDFNTFRHVAACLMKYIPNMTSDRAWELTNQVHYEGRAIVWVGPQEQAELNHEQLLRAGLTMAPLEPEGS

SEQ ID NO: 6513 - protein, 78 aa, Thermosynechococcus elongatus
ASVVPQERQQVARKHYPNYKVIVLNDDFNTFRHVAACLMKYIPNMTSDRAWELTNQVHYGGRAIVWVGPQEQAELYHE

SEQ ID NO: 6514 - protein, 95 aa, Thermosynechococcus elongatus
ASVVPQERQQVARKHYPNYKVIVLNDDFNTFRHVASCLMKYIPNMTSDRAWELTNQVHYEGRAIVWVGPQEQAELYHEQLLRAGLTMAPLEPEGS

SEQ ID NO: 6515 - protein, 95 aa, Thermosynechococcus elongatus
ASVVPQERQQVARKHYPNYKFIVLNDDFNTFQHVAACLMKYIPNMTSDRAWELTNQVHYKGQAIVWVGPQEQAELNHEQLLRAGLTMAPLDPEGS

SEQ ID NO: 6516 - protein, 95 aa, Thermosynechococcus elongatus
ASVVPQERQQVARKHYPNSEVIVLNDDFNTFRHVAACLMKYIPNMTSDRAWELTNQVHYEGQAIVWVGPQEQAELYHEQLLRAGLTMAPLEPGGS

SEQ ID NO: 6517 - protein, 95 aa, Thermosynechococcus elongatus
ASVVPQERQQVARKHYPNCKVIVLNDDFNTFRHVAACLMKYIPNMTSDRAWELTNQVHYEGQAIVWVGPQVQAELYHEQLLRAGLTMAPLEPEGS

SEQ ID NO: 6518 - protein, 95 aa, Thermosynechococcus elongatus
ASVVPQERQQVARKRYPNYKVIVLNDDFNTFQHVAACLMKYIPNKTSDRAWELTNQVHYEGQAIVWVGPQEQAELYHEQLLRAGLTMAPLEPEGS

SEQ ID NO: 6519 - protein, 95 aa, Thermosynechococcus elongatus
ASVVPQERQQVARTHYPNYKVIVLNDDFNTFQHVAACLMKYIPNMTSDRAWELTNQVHYVGQAIVWVGPQEQAELYHEQLLRAGLTMAPLEPEGS

SEQ ID NO: 6520 - protein, 40 aa, Thermosynechococcus elongatus
ASVVPQERQQVARMHYPNYKVIVLNDDFNTFQHVVACLKK

SEQ ID NO: 6521 - protein, 95 aa, Thermosynechococcus elongatus
ASVVPQERQQVARQHYPNYKVIVLNDDFNTFQHVAACLMKYIPNMTSDRAWELTNQVHYVGQAIVWVGPQEQAELYHEQLLRAGLTMAPLEPKGS

SEQ ID NO: 6522 - protein, 95 aa, Thermosynechococcus elongatus; identical to SEQ ID NO: 1377

SEQ ID NO: 6523 - protein, 95 aa, Thermosynechococcus elongatus; identical to SEQ ID NO: 1378

SEQ ID NO: 6524 - protein, 95 aa, Thermosynechococcus elongatus; identical to SEQ ID NO: 3

SEQ ID NO: 6525 - protein, 95 aa, Thermosynechococcus elongatus
ASVVPQERQQYTRKHYPNYKVIVLNDDFNTYRHVAACLMKYIPNKTSDRAWELTNHCHYEGLAIVWVGPQEQAEFYHEQLLRAGLTMAPLEPEGS

SEQ ID NO: 6526 - protein, 95 aa, Thermosynechococcus elongatus
ASVVPQERQQYTRKHYPNYKVIILNDDFNTFQHVAACLMKYIPNMTSDRAWELTNQVHYEGQAIVRVGPQEQAELYHKQLLRAGLTMAPLEPEGS

SEQ ID NO: 6527 - protein, 95 aa, Thermosynechococcus elongatus
ASVVPQERQQYTRKHYPNYKVIVMNDDFNTILHYAACLMKYIPNMTSDRASELTNQVQYEGQAIVWVGPQEQAELFHVQLLRAGLTLAPLEPVGS

SEQ ID NO: 6528 - protein, 77 aa, Thermosynechococcus elongatus
ASVVPQERQQYTRKHYPNYKVIVLNDDFNTFRHVAACLMKYIPNMTSDRAWELTNQVHYEGQAIVWVGQQEQAVLYH

SEQ ID NO: 6529 - protein, 95 aa, Thermosynechococcus elongatus
ASVVPQERQQYTRKHYPNYKVIVLNDDFNTFRHVAACLMKYIPNMTSDRAWELTNQVHYEGQAIVWVGPQEQAELYHEQFLRAGLTMAPLEPEGS

SEQ ID NO: 6530 - protein, 95 aa, Thermosynechococcus elongatus
ASVVPQERQQFTSKHYPNYKVIVLNDDFNTFRHFAACLMKYIPNMTSDRAWELTNQVHYECQAIVWVGPQEQAELYHEQLLRAGLTMAPLEPEGS

SEQ ID NO: 6531 - protein, 95 aa, Thermosynechococcus elongatus; identical to SEQ ID NO: 1826

SEQ ID NO: 6532 - protein, 95 aa, Thermosynechococcus elongatus
ASVVPQERQHDTRKHYPNYKVIVLNDDFNTFQHVVACLKKYIPNMISDRAWELTNQVHYGGRAIVWVGPQEQAELYHEQLLRAGLTMAPLEPEGS

SEQ ID NO: 6533 - protein, 95 aa, Thermosynechococcus elongatus
ASVVPQERQHDTRKHYPNYKVIVLNDDFNTFRHVAACLMKYIPNMTSDRAWELTNQVHYEGQAIVWVGPQEQAELYHEQLLRAGLTMAPLEPGGS

SEQ ID NO: 6534 - protein, 95 aa, Thermosynechococcus elongatus
ASVVPQERQHDTRKHYPNYKVIVLNDDFNTFRHVAACLMKYIPNMTSDRAWELTNQVHYEGLAIVWVGPQEQAELFHEQLLRAGLTLAPLEPEGS

SEQ ID NO: 6535 - protein, 95 aa, Thermosynechococcus elongatus
ASVVPQERQHDTRKHYPNYKVRVLNDDFNTFRHVAACLMKYIPNKTSDRAWELTNQVHYEGQAIVWVGPQEQAELYHEQLLRAGLTMAPLEPEGS

SEQ ID NO: 6536 - protein, 95 aa, Thermosynechococcus elongatus
ASVVPQERQHDPRKHYPNYKVIVLNDDFNTFRHVAACLMKYIPHMTSDRAWDLTNQVHYEGQAIVWVGPQEQAELYHEQLLRAGLTMAPLEPEGS

SEQ ID NO: 6537 - protein, 95 aa, Thermosynechococcus elongatus
ASVVPQERQHVTRKHYPNYKVIILNDDFNTFQHVAACLMKYIPNMTSDRAWELTNQVHYEGQAIVRVGPQEQAELYHKQLLRAGLTMAPLEPEGS

SEQ ID NO: 6538 - protein, 95 aa, Thermosynechococcus elongatus
ASVVPQERQHVTRKHYPNYKVIVLNDDFNTFRHVAACLMKYIPNMTSDRAWELTNQVHYEGQAIVWVGPQEQAELYHEQLLRAGLTMAPLEPEGS

SEQ ID NO: 6539 - protein, 51 aa, Thermosynechococcus elongatus
ASVVPQERQHVTRKHYPNYKVIVLNDDFNTFRHVAACLMKYIPNMTSDRAW

SEQ ID NO: 6540 - protein, 95 aa, Thermosynechococcus elongatus
ASVVPQERQHVTRKHYPNYKVIVLNDDFNTFRHVAACLMKYIPNMTSDRAWELTNQVHYKGQAIVWVGPQEQAELNHEQLLRAGLTMAPLEPEGS

SEQ ID NO: 6541 - protein, 95 aa, Thermosynechococcus elongatus
ASVVPQERQHVTRKHYPNYKVIVLNDDFNTFRHVAACLMKYIPNMTSDRAWELTNQVHYKGPAIGWVGPQAQAEFHHDQLLRAGLTMAPLEPEGS

SEQ ID NO: 6542 - protein, 95 aa, Thermosynechococcus elongatus
ASVVPQERQHVARKHYPNYEGRVVNDDFNTFQLVAACLMKYLPHLTSDRAWELTNQVHYVGQAIVWVGPQEQAELYHEQLLRAGLTMAPLEPEGS

SEQ ID NO: 6543 - protein, 95 aa, Thermosynechococcus elongatus; identical to SEQ ID NO: 12

SEQ ID NO: 6544 - protein, 95 aa, Thermosynechococcus elongatus; identical to SEQ ID NO: 4

SEQ ID NO: 6545 - protein, 95 aa, Thermosynechococcus elongatus; identical to SEQ ID NO: 2

SEQ ID NO: 6546 - protein, 95 aa, Thermosynechococcus elongatus; identical to SEQ ID NO: 63

SEQ ID NO: 6547 - protein, 95 aa, Thermosynechococcus elongatus; identical to SEQ ID NO: 1827

SEQ ID NO: 6548 - protein, 37 aa, Thermosynechococcus elongatus
ASVVPQERQPDTRKHYPNYKVIVLNDDFNTFRHGAAC

SEQ ID NO: 6549 - protein, 77 aa, Thermosynechococcus elongatus
ASVVPQERQRDTRKHYPNYKVIVLNDDFNTFRHVAACLMKYIPNKTSDRAWELTNQVHYEGQAIVWVGPQEQAELYH

SEQ ID NO: 6550 - protein, 95 aa, Thermosynechococcus elongatus
ASVVPQERQRDTRKHYPNYKVIVLNDDFNTFRHVAACLMKYIPNMTSDRAWELTNQVHYEGQAIVWVGPQEQAELYHEQLLRAGLTRAPLEPEGS

SEQ ID NO: 6551 - protein, 95 aa, Thermosynechococcus elongatus
ASVVPQERQLDTRKHYPNYKVIVLNDDFNTFRHVAACLMKYIPNMTSDRAWELTNQVHYEGQAIVWVGPQEQAELYHEQLLRAGLTMAPLEPEGS

SEQ ID NO: 6552 - protein, 95 aa, Thermosynechococcus elongatus
ASVVPQERQLDTRKHYPNYKVLVLNDDFNTFRHVAACLMKYIPNMTSDRAWELTNQVHYEGQAIVWVGPQEQAELYHEQLLRAGLTMAPLEPEGS

SEQ ID NO: 6553 - protein, 95 aa, Thermosynechococcus elongatus
ASVVPQERQLVTRKHYPNYKVIVLNVDFITFLHVAACLMKYIPNMTSDRAWELTNQVHYEGQAIVWVGPQEQAELYHEQLLRAGLTMAPLEPEGS

SEQ ID NO: 6554 - protein, 9 aa, Thermosynechococcus elongatus
ASVVPQERQ

SEQ ID NO: 6555 - protein, 9 aa, Thermosynechococcus elongatus
ASVVPQERQ

SEQ ID NO: 6556 - protein, 9 aa, Thermosynechococcus elongatus
ASVVPQERQ

SEQ ID NO: 6557 - protein, 9 aa, Thermosynechococcus elongatus
ASVVPQERQ

SEQ ID NO: 6558 - protein, 9 aa, Thermosynechococcus elongatus
ASVVPQERQ

SEQ ID NO: 6559 - protein, 95 aa, Thermosynechococcus elongatus
ASVVPQERHQDTRKHYPNYKVTVLNDDFNTFRHVAACLMKYIPNKTSDRAWELTNQVHYEGQAIVWVGPQEQAELYHEQLLRAGLTMAPLEPEGS

SEQ ID NO: 6560 - protein, 95 aa, Thermosynechococcus elongatus
ASVVPQERHQDTRKHYPNYKVIVLNDDFNTFRHVAACLMKYIPNKTSDRAWELTNQVHYEGQAIVWVGPQEQAELNHEQLLRAGLTMAPLEPEGS

SEQ ID NO: 6561 - protein, 95 aa, Thermosynechococcus elongatus
ASVVPQERHQDTRKHYPNYKVIVLNDDFNTFRHVAACLMKYIPNKTSDRAWELTNQVHYEGQAIVWVGPQEQAELYHEQLLRAGLTMAPLEPEGS

SEQ ID NO: 6562 - protein, 95 aa, Thermosynechococcus elongatus
ASVVPQERHQVTRKHYPNYKVIVLNDDFNTFRHVAACLMKYIPNMTSDRAWELTNQVHYKGQAIVWVGPQEQAELNHEQLLRAGLTMAPLEPEGS

SEQ ID NO: 6563 - protein, 95 aa, Thermosynechococcus elongatus
ASVVPQERHQVSRKHHPNYKVIVLNDDFNTFRHVAACLMKYIPNMTSDRAWELTNQVHYEGQAIVWVGPQEQAELYHEQLLRAGLTMAPLEPEGS

SEQ ID NO: 6564 - protein, 95 aa, Thermosynechococcus elongatus
ASVVPQERPQVARKHYPNYKVIVLNDDFNTFRHVAACLMKYIPNMTSDRAWELTNQVHYEGQAIVWVGPQVQAELYHEQLLRAGLTMAPLEPEGS

SEQ ID NO: 6565 - protein, 95 aa, Thermosynechococcus elongatus
ASVVPQERPQVARKHYPNYKVIVLNDDFNTFRHVAACLMKYIPNMTSDRAWELTNQVHYEGQAIVWVGPQVQAELYHEQLLRAGLTMAPLEPGGS

SEQ ID NO: 6566 - protein, 95 aa, Thermosynechococcus elongatus
ASVVPQERPQDTRKHYPNYKGIVLNDDFNTFRHVAACLMKYIPNMTSDRAWELTNQVHYEGQAIVWVGPQVQAELYHEQLLRAGLTMAPLEPGGS

SEQ ID NO: 6567 - protein, 95 aa, Thermosynechococcus elongatus
ASVVPQERPQDTRKHYPNYKVRVWNDDFNTFRQVAACLMKYIPNMTSDRAWELTNQVHYEGQAIVWVGPQEQAELYHEQLLRAGLTMAPLEPEGS

SEQ ID NO: 6568 - protein, 95 aa, Thermosynechococcus elongatus
ASVVPQERPQDTRKHYPNFKVIVLNDVFNTFRHVAACLKKYIPNKTSDRAWELTNQVHYEGQAIVWVGPQAQAELYHEQLLRAGLTMAPLEPEGS

SEQ ID NO: 6569 - protein, 95 aa, Thermosynechococcus elongatus
ASVVPQERPQDTRQHYPNYKVIVLNDDFNTFRHVAACLMKYIPNMTSDRAWELTNQVHYEGQAIVWVGPQEQAELYHEQLLRAGLTMAPLEPEGS

SEQ ID NO: 6570 - protein, 95 aa, Thermosynechococcus elongatus
ASVVPQERPQVTRKHYPNYKVIVLNDDFNTFRHVAACLMKYIPNKTSDRAWELTNHVHYEGLAIVWVGPQVQAELYHENLVRAGVTWAPLVREGS

SEQ ID NO: 6571 - protein, 95 aa, Thermosynechococcus elongatus
ASVVPQERPQVTRKHYPNYKVIVLNDDFNTFRHVAACLMKYIPNMTSDRAWELTNQVHYEGQAIVWVGPQVQAELYHEQLLRAGLTMAPLEPGGS

SEQ ID NO: 6572 - protein, 95 aa, Thermosynechococcus elongatus
ASVVPQERPHDTRKHYPNSQVIVLNDDFNTFRHVAACLMKYIPNMTSDRAWELTNQVHYEGQAIVWVGPQEQAELYHEQLLRAGLTMAPLEPEGS

SEQ ID NO: 6573 - protein, 95 aa, Thermosynechococcus elongatus
ASVVPQERRQVARKHYPNYKVIVLNDDFNTFRHVAACLMKYIPNKTSDRAWELTNQVHYEGQAIVWVGPQEQAELYHEQLLRAGLTMAPLEPEGS

SEQ ID NO: 6574 - protein, 95 aa, Thermosynechococcus elongatus
ASVVPQERRQVARKHYPNYKVIVLNDDFNTFRHVAACLMKYIPNMTSDRAWELTNQVHYEGQAIVRVGPQEQAELYHKQLLRAGLTMAPLEPEGS

SEQ ID NO: 6575 - protein, 95 aa, Thermosynechococcus elongatus
ASVVPQERRQVARKHYPNYKVIVLNDDFNTFRHVAACLMKYIPNMTSDRAWELTNQVHYEGQAIVWVGPQEQAELYHEQLLRAGLTMAPLEPEGS

SEQ ID NO: 6576 - protein, 95 aa, Thermosynechococcus elongatus
ASVVPQERRQVARKHYPNYKVIVLNDDFNTFRHVAACLMKYIPNMTSDRAWELTNQVHYEGQAIVWVGPQVQAELYHEQLLRAGLTMAPLEPEGS

SEQ ID NO: 6577 - protein, 95 aa, Thermosynechococcus elongatus
ASVVPQERRQDTRKHYPNYKVIVLNDDFNTFRHVAACLMKYIPNMTSDRAWELTNQVHYEGQAIVWVGPQEQAELYHEQLLRAGLTMAPLEPEGS

SEQ ID NO: 6578 - protein, 95 aa, Thermosynechococcus elongatus
ASVVPQERRQVTRKHYPNYKVIVLNDDFNTFRHVAACLMKYIPNMTSDRAWELTNQVHYKGQAIVWVGPQEQAELNHEQLLRAGLTMAPLEPEGS

SEQ ID NO: 6579 - protein, 95 aa, Thermosynechococcus elongatus
ASVVPQERRQVTRKHYPNYKVIVLNDDFNTFRHVAACLMKYIPNMTSDRAWELTNQVHYKGQAVVWVGPQEQAELNHEQLLRAGLTMAPLEREGS

SEQ ID NO: 6580 - protein, 95 aa, Thermosynechococcus elongatus
ASVVPQERLQDTRKHYPNYKVIVLNDDFNTFRHVAACLMKYIPNKTSDRAWELTNQVHYEGQAIVWVGPQEQAELYHEQLLRAGLTMAPLEPEGS

SEQ ID NO: 6581 - protein, 95 aa, Thermosynechococcus elongatus
ASVVPQEREQVTRKHYPNYKVIVLNDDFNTFRHVAACLMKYIPNMTSDRAWELTNQVHYEGQAIVWVGPQEQAELYHEQLLRAGLTMAPLEPEGS

SEQ ID NO: 6582 - protein, 8 aa, Thermosynechococcus elongatus
ASVVPQER

SEQ ID NO: 6583 - protein, 95 aa, Thermosynechococcus elongatus
ASVVPQESQQDTRKHYPNYKVIVLNDDFNTFQHVVACLKKYIPNMTSDRAWELTNQVHYEGQAIVWVGPQEQAELYHEQLLRAGLTMAPLEPEGS

SEQ ID NO: 6584 - protein, 95 aa, Thermosynechococcus elongatus; identical to SEQ ID NO: 1460

SEQ ID NO: 6585 - protein, 95 aa, Thermosynechococcus elongatus; identical to SEQ ID NO: 4

SEQ ID NO: 6586 - protein, 95 aa, Thermosynechococcus elongatus; identical to SEQ ID NO: 7

SEQ ID NO: 6587 - protein, 95 aa, Thermosynechococcus elongatus
ASVVPQERQQDTRKHYPNYEVIVLNDDFNTFRHVAACLMKYIPNKTSDRAWELTNQVHYEGQAIVWVGPQEQAELYHEQLLRAGLTMAPLEPEGS

SEQ ID NO: 6588 - protein, 95 aa, Thermosynechococcus elongatus; identical to SEQ ID NO: 5

SEQ ID NO: 6589 - protein, 90 aa, Thermosynechococcus elongatus
ASVVPQESQQDTRKHYPNYKVIVLNDDFNTFRHVAACLMKYIPNMTSDRAWELTNQLHYEGQAIVWVGPQEQAELYHEQLMRAGLTMAPL

SEQ ID NO: 6590 - protein, 95 aa, Thermosynechococcus elongatus
ASVVPQESQQDTRKHYPNYKVIVLNDDFNTFRHVAACLMKYIPNMTSDRAWELTNQVHYEGQAIVWVGPQEQAELYHEQLLRAGLTMAPLEPEGS

SEQ ID NO: 6591 - protein, 95 aa, Thermosynechococcus elongatus
ASVVPQESQQVTRKHYPNYKVIVLNDDFNTFRHVAACLMKYIPNMTSDRAWELTNQVHYKGQAIVWVGPQEQAELNHEQLLRAGLTMAPLEPEGS

SEQ ID NO: 6592 - protein, 95 aa, Thermosynechococcus elongatus
ASVVPQEIQQVARKHYPNYKVIVLNDDFNTFRHVAACLMKYIPNMTSDRAWELTNKVHYEGQAIVWVGPQVQAELYHEQLLRAGLTMAPLEPGGS

SEQ ID NO: 6593 - protein, 95 aa, Thermosynechococcus elongatus
ASVVPQEIQQVARKHYPNYKVIVLNDDFNTFRHVAACLMKYIPNMTSDRAWELTNQVHYEGQAIVWVGPQVQAELYHEQLLRAGLTMAPLEPGGS

SEQ ID NO: 6594 - protein, 95 aa, Thermosynechococcus elongatus
ASVVPQEIQQDTRKHYPNYKVIVLNDDFNTFRHVAACLMKYIPNKTSDRAWELTNQVHYEGQAIVWVGPQEQAELYHEQLLRAGLTMAPLEPEGS

SEQ ID NO: 6595 - protein, 95 aa, Thermosynechococcus elongatus
ASVVPQEIQQDTRKHYPNYKVIVLNDDFNTFRHVAACLMKYIPNMTSDRAWELTNQVHYEGQAIVWVGPQEQAELYHEQLLRAGLTMAPLEPGGS

SEQ ID NO: 6596 - protein, 95 aa, Thermosynechococcus elongatus
ASVVPQEIQQDTRKHYPNYKVIVLNDDFNTFRHVAACLMKYIPNMTSDRAWELTNQVHYEGQAIVWVGPQVQAELYHEQLLRAGLTMAPLEPGGS

SEQ ID NO: 6597 - protein, 95 aa, Thermosynechococcus elongatus
ASVVPQEIQQDTRKHYPNYKVIVLNDDFNTFRHVAACLMKYIPNMTSDRAWELTNQVHYGGRAIVWVGPQEQAELYHEQLLRAGLTMAPLEPEGS

SEQ ID NO: 6598 - protein, 95 aa, Thermosynechococcus elongatus
ASVVPQEIQQDTRKHYPNYKVIVLNDDFNTFRHVAACLMKYIPNMTSDRAWELTNQVHYKGQAIVWVGPQEQAELNHEQLLRAGLTMAPLEPEGS

SEQ ID NO: 6599 - protein, 95 aa, Thermosynechococcus elongatus
ASVVPQEIQQVTRKHHPNYKVIVLNDDFNTFRHVAACLMKYIPNMTSDRAWELTNQVHYEGQAIVWVGPQEQAELYHEQLLRAGLTMAPLEPEGS

SEQ ID NO: 6600 - protein, 95 aa, Thermosynechococcus elongatus
ASVVPQEIQQVTRKHYPNYKVIVLNDDFNTFRHVAACLMKYIPNMTSDRAWELTNQVHYKGQAIVWVGPQEQAELNHEQLLRAGLTMAPLEPEGS

SEQ ID NO: 6601 - protein, 95 aa, Thermosynechococcus elongatus
ASVVPQEIQQVTRKHYPNYKVIVLNDDFNTFRHVAACLMKYIPNMTSDRAWELTNQVHYGGRAIVWVGPQEQAELYHEQLLRAGLTMAPLEPEGS

SEQ ID NO: 6602 - protein, 15 aa, Thermosynechococcus elongatus
ASVVPQERQQVARKH

SEQ ID NO: 6603 - protein, 95 aa, Thermosynechococcus elongatus
ASVVPQERQQDTRKHYPNYKVIVLNDDFNTFRHVTACVMKYIPNMTSDRAWELTNHVHYEGQAIVWVGPQEQAELYHEQLLRAGLTMAPLEPEGS

SEQ ID NO: 6604 - protein, 95 aa, Thermosynechococcus elongatus
ASVVPQERQQDTRKHYPNYKVIVLNDDFNTFRHVDACLMKYIPNMTSDRAWELTNQVHYKGQAIVWVGPQEQAELNHEQLLRAGLTMAPLEPEGS

SEQ ID NO: 6605 - protein, 37 aa, Thermosynechococcus elongatus
ASVVPQERQQDTRKHYPNYKVLVLNDDFNTFRHVAAC

SEQ ID NO: 6606 - protein, 95 aa, Thermosynechococcus elongatus; identical to SEQ ID NO: 13

SEQ ID NO: 6607 - protein, 95 aa, Thermosynechococcus elongatus
ASVVPQEEQQVTRKHYPNYKVIVLNDDFNTFQHVVACLKKYIPNMISDRAWELTNQVHYGGRAIVWVGPQEQAELYHEQLLRAGLTMAPLEPEGS

SEQ ID NO: 6608 - protein, 95 aa, Thermosynechococcus elongatus
ASVVPQEGKQVTRKHYPNYKVIVLNDDFNTFQHVVACLKKYIPNMISDRAWELTNQVHYGGRAIVWVGPQEQAELYHEQLLRAGLTMAPLEPEGS

SEQ ID NO: 6609 - protein, 22 aa, Thermosynechococcus elongatus
ASVVPQEGQQVARKHYPNNKKK

SEQ ID NO: 6610 - protein, 95 aa, Thermosynechococcus elongatus; identical to SEQ ID NO: 839

SEQ ID NO: 6611 - protein, 95 aa, Thermosynechococcus elongatus
ASVVPQEGQQVARKHYPNYKVIVLNDDFNTFQHVVACLKKYIPNMISDRAWELTNQVHYGGRAIVCVGPQEQAELYHEQLLRAGLTMAPLEPEGS

SEQ ID NO: 6612 - protein, 95 aa, Thermosynechococcus elongatus
ASVVPQEGQQVARKHYPNYKVIVLNDDFNTFRHDAACLMKYIPNMTSDRAWELTNQVHYEGQAIVWVGPQVQAELYHEQLLRAGLTMAPLEPEGS

SEQ ID NO: 6613 - protein, 95 aa, Thermosynechococcus elongatus
ASVVPQEGQQVARKHYPNYKVIVLNDDFNTFRHVAACLMKYIPNKTSDRAWELTNQVHYEGQAIVWVGPQVQAELYHEQLLRAGLTMAPLEPGGS

SEQ ID NO: 6614 - protein, 95 aa, Thermosynechococcus elongatus; identical to SEQ ID NO: 641

SEQ ID NO: 6615 - protein, 95 aa, Thermosynechococcus elongatus; identical to SEQ ID NO: 641

SEQ ID NO: 6616 - protein, 95 aa, Thermosynechococcus elongatus
ASVVPQEGQQVARKHYPNYKVIVLNDDFNTFRHVAACLMKYIPNMTSERAWELTNQVHYEGQAIVWVGPQVQAELYHEQLLRAGLTMAPLEPGGS

SEQ ID NO: 6617 - protein, 95 aa, Thermosynechococcus elongatus; identical to SEQ ID NO: 1192

SEQ ID NO: 6618 - protein, 95 aa, Thermosynechococcus elongatus
ASVVPQEGQQVARKHYPNYKVIVLNDDFNTFRHVAACLMKYIPNMTSDRAWELTNQVHYKGQAIVWVGPQEQAELYHEQLLRAGLTMAPLEPEGS

SEQ ID NO: 6619 - protein, 95 aa, Thermosynechococcus elongatus
ASVVPQEGHQVTRKHYPNYKVKVKNDHINTNKHDHASLKKYIPNMISDRAWELTNQLHYGGRAIVWVGPLDQAVLFLELLLRAGLSMAPLEAVGS

SEQ ID NO: 6620 - protein, 95 aa, Thermosynechococcus elongatus
ASVVPQEGHQVTRKHYPNNKVIVLNDDFNTFQHVFAFMKKYIPNMISDRAWELTNQVHYGGRAIVWVGPQEQAELYHEQLLRAGLTMAPLEPEGS

SEQ ID NO: 6621 - protein, 95 aa, Thermosynechococcus elongatus
ASVVPQEGQKVTRKHYPNYKVIVLNDDFNTFQHVVACLKKYIPNMISDRAWELTNQVHYEGQAIVWVGPQEQAELYHEQLLRAGLTMAPLEPEGS

SEQ ID NO: 6622 - protein, 95 aa, Thermosynechococcus elongatus
ASVVPQEGQKVTRKHYPNYKVIVLNDDFNTFQHVVACLKKYIPNMISDRAWELTNQVHYGGRAIVWVGPQEQAELYHEQLLRAGLTMAPLEPGGS

SEQ ID NO: 6623 - protein, 95 aa, Thermosynechococcus elongatus; identical to SEQ ID NO: 298

SEQ ID NO: 6624 - protein, 95 aa, Thermosynechococcus elongatus
ASVVPQEGQKVTRKHYPNYKVIVLNDYFNTFQHVVACLKKYIPNMISDRAWELTNQVHYGGRAIVWVGPQEQAELYHEQLLRAGLTMAPLEPEGS

SEQ ID NO: 6625 - protein, 21 aa, Thermosynechococcus elongatus
ASVVPQEGQQVLESTTQTTRL

SEQ ID NO: 6626 - protein, 52 aa, Thermosynechococcus elongatus
ASVVPQEGQQETRKHYPNYKDIDLNDDFNTFRHVPACLMKYIPNMTSDRACE

SEQ ID NO: 6627 - protein, 95 aa, Thermosynechococcus elongatus
ASVVPQEGQQDTRKHNPNYKFIVLNVDFNTIQHVDACLKKYIPNMISDRAWELTNQVHYGGRAIVWVGPQEQAELYHEQLLRAGLTMAPLEPEGS

SEQ ID NO: 6628 - protein, 95 aa, Thermosynechococcus elongatus
ASVVPQEGQQDTRKHYTNYKVIVLNDDFNTFRHVAACLMKYIPNKTSDRAWELTNQVHYEGQAIVWVGPQEQAELYHEQLLRAGLTMAPLEPEGS

SEQ ID NO: 6629 - protein, 95 aa, Thermosynechococcus elongatus
ASVVPQEGQQDTRKHYQNYKVIVLNDDFNTFRHVAACLMKYIPNMTSDRAWELTNQVHYEGQAIVWVGPQEQAELYHEQLLRAGLTMAPLEPEGS

SEQ ID NO: 6630 - protein, 95 aa, Thermosynechococcus elongatus
ASVVPQEGQQDTRKHYPNHKVIVLNDDFNTFRHVAACLMKYIPNMTSDRAWELTNQVHYEGQAIVWVGLREQAELYHEQLLRVGLTMAPLEPEGS

SEQ ID NO: 6631 - protein, 95 aa, Thermosynechococcus elongatus; identical to SEQ ID NO: 61

SEQ ID NO: 6632 - protein, 95 aa, Thermosynechococcus elongatus
ASVVPQEGQQDTRKHYPNYKDIVLNDDFNTFQHVVACLKKYIPNMISDRAWELTNQVHYGGRAIVWVGPQEQAELYHEQLLRAGLTMAPLEPEGS

SEQ ID NO: 6633 - protein, 95 aa, Thermosynechococcus elongatus
ASVVPQEGQQDTRKHYPNYKVRVLNDDFNTFQHVVACLKKYIPNMISDRAWELTNQVHYGGRAIVWVGPQEQAELYHEQLLRAGLTMAPLEPEGS

SEQ ID NO: 6634 - protein, 95 aa, Thermosynechococcus elongatus
ASVVPQEGQQDTRKHYPNYKVRVLNDDFNTFRHDAACLMKYIPNMTSDRAWELTNQVHYEGQAIVWVGPQVQAELYHEHLLRAGLSMAPLEPEGS

SEQ ID NO: 6635 - protein, 95 aa, Thermosynechococcus elongatus
ASVVPQEGQQDTRKHYPNYKVIILNDDFNTFQHVAACLMKYIPNMTSDRAWELTNQVHYEGQAIVRVGPQEQAELYHEQLLRAGLTMAPLEPEGS

SEQ ID NO: 6636 - protein, 95 aa, Thermosynechococcus elongatus; identical to SEQ ID NO: 299

SEQ ID NO: 6637 - protein, 95 aa, Thermosynechococcus elongatus
ASVVPQEGQQDTRKHYPNYKVIVLNDDFNTIQHVVACLKKYIPNMISDRAWELTNQVLYGGRAIVCVGPQEQAELYHEEFLRAGLSMAPLEPEGS

SEQ ID NO: 6638 - protein, 95 aa, Thermosynechococcus elongatus
ASVVPQEGQQDTRKHYPNYKVIVLNDDFNTFQHVAACLMKYIPNMTSDRAWELTNQVHYEGQAIVWVGPQEQAELYHEQLLRAGLTMAPLEPEGS

SEQ ID NO: 6639 - protein, 95 aa, Thermosynechococcus elongatus
ASVVPQEGQQDTRKHYPNYKVIVLNDDFNTFQHVAACLMKYIPNMTSDRAWELTNQVHYEGQAIVWVGPQVQAELYHEQLLRAGLTMAPLEPGGS

SEQ ID NO: 6640 - protein, 95 aa, Thermosynechococcus elongatus
ASVVPQEGQQDTRKHYPNYKVIVLNDDFNTFQHVAACLMKYIPNMISDRAWELTNQVHYGGRAIVWVGPQEQAELYHEQLSRAGLTMAPLEPEGS

SEQ ID NO: 6641 - protein, 95 aa, Thermosynechococcus elongatus; identical to SEQ ID NO: 202

SEQ ID NO: 6642 - protein, 95 aa, Thermosynechococcus elongatus
ASVVPQEGQQDTRKHYPNYKVIVLNDDFNTFQHVVACLKKYIPNMISDRAWELTNQGHYGGRAIVWVGPQEQAELYHDQLLRAGLTMAPLEPEGS

SEQ ID NO: 6643 - protein, 95 aa, Thermosynechococcus elongatus
ASVVPQEGQQDTRKHYPNYKVIVLNDDFNTFQHVVACLKKYIPNMISDRAWELTNQVHYKGQAIVWVGPQEQAELNHEQLLRAGLTMAPLEPEGS

SEQ ID NO: 6644 - protein, 95 aa, Thermosynechococcus elongatus
ASVVPQEGQQDTRKHYPNYKVIVLNDDFNTFQHVVACLMKYIPNMTSDRAWELTNQVHYEGQAIVWVGPQEQAELYHEQLLRAGLTMAPLEPEGS

SEQ ID NO: 6645 - protein, 95 aa, Thermosynechococcus elongatus
ASVVPQEGQQDTRKHYPNYKVIVLNDDFNTFQHVVSCLKKYIPNMISDRAWELTNQVHYGGRAIVWVGPQEQAELYHEQLLRAGLTMAPLEPEGS

SEQ ID NO: 6646 - protein, 95 aa, Thermosynechococcus elongatus
ASVVPQEGQQDTRKHYPNYKVIVLNDDFNTFRHDAACLMKYIPNMTSDRAWELTNQVHYEGQAIVWVGPQEQAELYHEQLLRAGLTMAPLEPEGS

SEQ ID NO: 6647 - protein, 95 aa, Thermosynechococcus elongatus
ASVVPQEGQQDTRKHYPNYKVIVLNDDFNTFRHGAACLMKYIPNKTSDRAWELTNQVHYGGRAIVWVGPHEHAELYHEHLLRAGLTMAPLEPEGS

SEQ ID NO: 6648 - protein, 95 aa, Thermosynechococcus elongatus
ASVVPQEGQQDTRKHYPNYKVIVLNDDFNTFRHVDACLMKYIPNMTSDRAWELTNQVHYVGQAIVWVGPQEQAELYHEQLLRAGLTMAPLEPEGS

SEQ ID NO: 6649 - protein, 95 aa, Thermosynechococcus elongatus
ASVVPQEGQQDTRKHYPNYKVIVLNDDFNTFRHVAACLKKYIPNMISDRAWELTNQVHYGGRAIVWVGPQEQAELYHEQLLIAGLTMAPLEPEGS

SEQ ID NO: 6650 - protein, 40 aa, Thermosynechococcus elongatus
ASVVPQEGQQDTRKHYPNYKVIVLNDDFNTFRHVAACLMK

SEQ ID NO: 6651 - protein, 95 aa, Thermosynechococcus elongatus; identical to SEQ ID NO: 83

SEQ ID NO: 6652 - protein, 95 aa, Thermosynechococcus elongatus
ASVVPQEGQQDTRKHYPNYKVIVLNDDFNTFRHVAACLMKYIPNKTSDRAWELTNQVHYKGQAIVWVGPQEQAELNHEQLLRAGLTMAPLEPEGS

SEQ ID NO: 6653 - protein, 95 aa, Thermosynechococcus elongatus
ASVVPQEGQQDTRKHYPNYKVIVLNDDFNTFRHVAACLMKYIPNKTSDRAWELTNQVHYEGQAIVWVGPQEQAELNHEQLLRAGLTMAPLEPEGS

SEQ ID NO: 6654 - protein, 95 aa, Thermosynechococcus elongatus
ASVVPQEGQQDTRKHYPNYKVIVLNDDFNTFRHVAACLMKYIPNKTSDRAWELTNQVHYEGQAIVWVGPQEQAELNHEQLLRAGLTMAPLEPGGS

SEQ ID NO: 6655 - protein, 95 aa, Thermosynechococcus elongatus
ASVVPQEGQQDTRKHYPNYKVIVLNDDFNTFRHVAACLMKYIPNKTSDRAWELTNQVHYEGQAIVWVGPQEQAELYHEQLLRAGLTMATLEPEGS

SEQ ID NO: 6656 - protein, 95 aa, Thermosynechococcus elongatus
ASVVPQEGQQDTRKHYPNYKVIVLNDDFNTFRHVAACLMKYIPNKTSDRAWELTNQVHYEGQAIVWVGPQEQAELYHEQLLRAGLTMAPLEQEGS

SEQ ID NO: 6657 - protein, 95 aa, Thermosynechococcus elongatus
ASVVPQEGQQDTRKHYPNYKVIVLNDDFNTFRHVAACLMKYIPNKTSDRAWELTNQVHYEGQAIVWVGPQEQAELYHEQLLRAGLTMAPLEPGGS

SEQ ID NO: 6658 - protein, 95 aa, Thermosynechococcus elongatus
ASVVPQEGQQDTRKHYPNYKVIVLNDDFNTFRHVAACLMKYIPNKTSDRAWELTNQVHYEGQAIVWVGPQEQAELYHEHLLRAGLTMAPLEPEGS

SEQ ID NO: 6659 - protein, 95 aa, Thermosynechococcus elongatus
ASVVPQEGQQDTRKHYPNYKVIVLNDDFNTFRHVAACLMKYIPNKTSDRAWELTNQVHYEGQAIVWVGPQVQAELYHEQLLRAGLTMAPLEPGGS

SEQ ID NO: 6660 - protein, 95 aa, Thermosynechococcus elongatus
ASVVPQEGQQDTRKHYPNYKVIVLNDDFNTFRHVAACLMKYIPNMTSDRAWELTNQVHYEGQAIDWVGPQEQAELYHEQLLRAGLTMAPLEPEGS

SEQ ID NO: 6661 - protein, 95 aa, Thermosynechococcus elongatus; identical to SEQ ID NO: 1846

SEQ ID NO: 6662 - protein, 95 aa, Thermosynechococcus elongatus
ASVVPQEGQQDTRKHYPNYKVIVLNDDFNTFRHVAACLMKYIPNMTSDRAWELTNQVHYEGQAIVRVGPQEQAELYHEQLLRAGLTMAPLEPEGS

SEQ ID NO: 6663 - protein, 95 aa, Thermosynechococcus elongatus; identical to SEQ ID NO: 61

SEQ ID NO: 6664 - protein, 95 aa, Thermosynechococcus elongatus
ASVVPQEGQQDTRKHYPNYKVIVLNDDFNTFRHVAACLMKYIPNMTSDRAWELTNQVHYEGQAIVWVGPQEQAELYNEQLLRAGLTMAPLEPEGS

SEQ ID NO: 6665 - protein, 95 aa, Thermosynechococcus elongatus
ASVVPQEGQQDTRKHYPNYKVIVLNDDFNTFRHVAACLMKYIPNMTSDRAWELTNQVHYEGQAIVWVGPQVQAGLYHEQLLRAGLTMAPLEPGGS

SEQ ID NO: 6666 - protein, 95 aa, Thermosynechococcus elongatus
ASVVPQEGQQDTRKHYPNYKVIVLNDDFNTFRHVAACLMKYIPNMTSDRAWELTNQVHYEGQAIVWVGPREQAELYHEQLLRAGLTMAPLEPEGS

SEQ ID NO: 6667 - protein, 95 aa, Thermosynechococcus elongatus; identical to SEQ ID NO: 6666

SEQ ID NO: 6668 - protein, 95 aa, Thermosynechococcus elongatus
ASVVPQEGQQDTRKHYPNYKVIVLNDDFNTFRHVAACLMKYIPNMTSDRAWELTNQVHYEGQAIVWVCPQEQAELYHEQLLRAGLTMAPLEPEGS

SEQ ID NO: 6669 - protein, 95 aa, Thermosynechococcus elongatus
ASVVPQEGQQDTRKHYPNYKVIVLNDDFNTFRHVAACLMKYIPNMTSDRAWELTNQVHYKGQAIVWVGPQEQAELNHEHLLRAGLTMAPLEPEGS

SEQ ID NO: 6670 - protein, 95 aa, Thermosynechococcus elongatus; identical to SEQ ID NO: 299

SEQ ID NO: 6671 - protein, 95 aa, Thermosynechococcus elongatus
ASVVPQEGQQDTRKHYPNYKVIVLNDDFNTFLHVAACLMKYIPNKTSDRAWELTNQVHYEGLAIVWVGPQEQAELYHEQLLRAGLTMAPLEPEGS

SEQ ID NO: 6672 - protein, 95 aa, Thermosynechococcus elongatus
ASVVPQEGQQDTRKHYPNYKVIVFNDDFNTFRHVAACLMKYIPNMTSDRAWELTNQVHYEGQAIVWVGPQEQAELYHEQLLRAGLTMAPLEPEGS

SEQ ID NO: 6673 - protein, 95 aa, Thermosynechococcus elongatus
ASVVPQEGQQDTRKHYPNCKVIVLNDDFNTFRHVAACLMKYIPNKTSDRAWELTNQVHYEGQAIVWVGPQEQAELYHEQLLRAGLTMAPLEPEGS

SEQ ID NO: 6674 - protein, 95 aa, Thermosynechococcus elongatus
ASVVPQEGQQDTRKRYPNYKVRGLNDDFNTFRHVAACLMKYIPNMTSDRAWELTNQVHYEGQAIVWVGPQEQAELYHEQLLRAGLTMAPLEPEGS

SEQ ID NO: 6675 - protein, 95 aa, Thermosynechococcus elongatus
ASVVPQEGQQATRKHYPNYKVIVLNDDFNTFQHVVACLKKYIPNKTSDRAWELTNQVHYGGRAIVWVGPQEQAELYHEQLLRAGLTMAPLEPEGS

SEQ ID NO: 6676 - protein, 95 aa, Thermosynechococcus elongatus
ASVVPQEGQQATRKHYPNYKVIVLNDDFNTFQHVVACLMKYIPNMTSDRAWELTNQVHYEGQAIVWVGPQVQAELYHEQLLRAGLTMAPLEPGGS

SEQ ID NO: 6677 - protein, 95 aa, Thermosynechococcus elongatus
ASVVPQEGQQGTRKHYPNYKVIVLNDDFNTVKHGVACLKKYIPNMISDRAWELTNQVHYGGRAIVWVGPQEQAVLYHEQLLRAGLTMAPLEPEGS

SEQ ID NO: 6678 - protein, 95 aa, Thermosynechococcus elongatus
ASVVPQEGQQGTRKHYPNYKVIVLNDDFNTFRHVAACLMKYIPNKTSDRAWELTNQVHYEGQAIVWVGPQEQAELYHEQLLRAGLTMAPLEPEGS

SEQ ID NO: 6679 - protein, 95 aa, Thermosynechococcus elongatus
ASVVPQEGQQVTRKHYPNYKDIDLNDDFNTFQHVLASLKKNIPNMISDRAWELTNQVLFGGRAIVWVGPQEQAELNHEQLLRAGLTMAPLVPEGS

SEQ ID NO: 6680 - protein, 95 aa, Thermosynechococcus elongatus
ASVVPQEGQQVTRKHYPNYKDIDLNDDFNTFQHVVACLKKYNPNMISDRAWELTNQVHFGGRAIVWVGPQAQAEFYDEQLLRAGLTMAPLDLEGS

SEQ ID NO: 6681 - protein, 75 aa, Thermosynechococcus elongatus
ASVVPQEGQQVTRKHYPNYKDIVLNDDYNTIQHVVACMKKYIPNMISDRAWELTNQVLYGGRAIVWVGPQEQAEL

SEQ ID NO: 6682 - protein, 95 aa, Thermosynechococcus elongatus
ASVVPQEGQQVTRKHYPNYKVIVLNDDFNTIRHDDACLMKYIRNMTSDRAWELTNLVHYEGQAIVWVGPQVQAELYHEQLLRAGLTMAPLEPGGS

SEQ ID NO: 6683 - protein, 95 aa, Thermosynechococcus elongatus
ASVVPQEGQQVTRKHYPNYKVIVLNDDFNTLKHFAACLMKYIPNMTSDRAWELTNQVHYEGQAIVWVGPQEQAVLYHEQLLRAGLTMAPLEPGGS

SEQ ID NO: 6684 - protein, 95 aa, Thermosynechococcus elongatus
ASVVPQEGQQVTRKHYPNYKVIVLNDDFNTFQHVVECLKKYIPNMISDRAWELTNHVHYGGRAIVWVGPQEQAELYHEQLLRAGLTMAPLEPEGS

SEQ ID NO: 6685 - protein, 95 aa, Thermosynechococcus elongatus
ASVVPQEGQQVTRKHYPNYKVIVLNDDFNTFQHVVACLKKYIPNMISDRAWELTNQVHYGGRAIVWVGPQEQAELYHEQLLRAGLTMAPSEPEGS

SEQ ID NO: 6686 - protein, 95 aa, Thermosynechococcus elongatus; identical to SEQ ID NO: 23

SEQ ID NO: 6687 - protein, 21 aa, Thermosynechococcus elongatus
ASVVPQEGQQVLESTTQTTRL

SEQ ID NO: 6688 - protein, 95 aa, Thermosynechococcus elongatus
ASVVPQEGQQVNRKHYPNYKVIVLNDDFNTFQHVVSCLKKYIPNMISDRAWELTNQVHYGGRAIVWVGPQEQAELYHEQLLRAGLTMAPLEPEGS

SEQ ID NO: 6689 - protein, 36 aa, Thermosynechococcus elongatus
ASVVPQEGQQVNRKHYPNYKVIFLNDYFNTFKQFVA

SEQ ID NO: 6690 - protein, 95 aa, Thermosynechococcus elongatus
ASVVPQEGQQVTRKHNPNYKVIVLNDDFNTFQHVFACLKKYIPNMISDRAWELTNQVHYGGRAIVWVGPQEQAELYHEQLLRAGLTMAPLEPEGS

SEQ ID NO: 6691 - protein, 95 aa, Thermosynechococcus elongatus
ASVVPQEGQQVTRKHYTNYKVIVLNDDFNTFQHVDACLMKYIPNMTSDRAWELTNHVHYEVLAIVWVGPQVQAELYHEQLLRAGLTMSPLEPGGS

SEQ ID NO: 6692 - protein, 95 aa, Thermosynechococcus elongatus
ASVVPQEGQQVTRKHYPNNKVIVLNDDFNTFQQVVSCLKKYIPNMISDRAWELTNQVHYGGRAIVWVGPQEQAELYHEQLLRAGLTMAPLEPEGS

SEQ ID NO: 6693 - protein, 95 aa, Thermosynechococcus elongatus; identical to SEQ ID NO: 1

SEQ ID NO: 6694 - protein, 95 aa, Thermosynechococcus elongatus
ASVVPQEGQQVTRKHYPNYKVIVLNDDFNTFQHVVACLKKYIPNMISDRAWELTNQVHYGGRAIVWVGPQEQAELYHDHLLRAGLTMAPLEPEGS

SEQ ID NO: 6695 - protein, 95 aa, Thermosynechococcus elongatus; identical to SEQ ID NO: 425

SEQ ID NO: 6696 - protein, 95 aa, Thermosynechococcus elongatus
ASVVPQEGQQVTRKHYPNYKVIVLNDDFNTFQHVVACLKKYIPNMISDRAWELTNQVHYGGRAIVWDGPQEQAELYHEQLLRAGLTMAPLEPEGS

SEQ ID NO: 6697 - protein, 95 aa, Thermosynechococcus elongatus
ASVVPQEGQQVTRKHYPNYKGIVLNDDFNTFQHVVACLKKYIPNLISDRAWELTNQVHYGGRAIVWVGPQEQAELYHEQLLRAGLTMAPLEPEGS

SEQ ID NO: 6698 - protein, 95 aa, Thermosynechococcus elongatus
ASVVPQEGQQVTRKHYPNYKVIVLNDDCNTFQHVAACVMKYIPNMTSDRAWELTTHVHYVGQAIVWVGPQEQAELYHEQMLRAGLTMAPLEPGGS

SEQ ID NO: 6699 - protein, 95 aa, Thermosynechococcus elongatus
ASVVPQEGQQVTKKHYPNYKVIVLNDDFNTFQHVVACLKKYIPNMISDRAWELTNQVHYGGRAIVWVGPQEQAELYHEQLLRAGLTMAPLEPEGS

SEQ ID NO: 6700 - protein, 95 aa, Thermosynechococcus elongatus
ASVVPQEGQQVTRKHYPNYKVIVLNDDFNTFRHVAACLMKYIPNKTSDRAWELTNQVHYVGQAIVWVGPQEQAELYHEQLLRAGLTMAPLEPEGS

SEQ ID NO: 6701 - protein, 95 aa, Thermosynechococcus elongatus; identical to SEQ ID NO: 20

SEQ ID NO: 6702 - protein, 95 aa, Thermosynechococcus elongatus; identical to SEQ ID NO: 332

SEQ ID NO: 6703 - protein, 18 aa, Thermosynechococcus elongatus
ASVVPQEGQQVTRKNYPN

SEQ ID NO: 6704 - protein, 95 aa, Thermosynechococcus elongatus
ASVVPQEGQQVTRKNYPNYKVIVLNDDFNTFQHVAACLMKYIPNKTSDRAWELTNQVHYEGQAIVWVGPQEQAELYHEQLLRAGLTMAPLEPEGS

SEQ ID NO: 6705 - protein, 95 aa, Thermosynechococcus elongatus
ASVVPQEGQQVTRKNYPNYKVIVLNDDFNTFQHVVECLKKYIPNMISDRAWELTNQVHYGGRAIVWVGPQEQAELYHEQLLRAGLTMAPLEPEGS

SEQ ID NO: 6706 - protein, 95 aa, Thermosynechococcus elongatus
ASVVPQEGQQVTRKNYPNYKVIVLNDDFNTFQHVVACLKKYIPNMISDRAWELTNQVHYGGRAIVWVGPQEQAELYHEQLLRAGLTMSPLEPEGS

SEQ ID NO: 6707 - protein, 95 aa, Thermosynechococcus elongatus
ASVVPQEGQQVTRKNYPNYKVIVLNDDFNTFQHVVACLMKYIPNKTSDRAWELTNQVHYEGQAIVWVGPQEQAELYHEQLLRAGLTMAPLEPEGS

SEQ ID NO: 6708 - protein, 95 aa, Thermosynechococcus elongatus
ASVVPQEGQQVTRKNYPNYKVIVLNDDFNTFRHVAACLMKYIPNMTSDRAWELTNQVHYKGQAIVWVGPQEQAELNHEQLLRAGLTMAPLEPEGS

SEQ ID NO: 6709 - protein, 95 aa, Thermosynechococcus elongatus
ASVVPQEGQQVTRKNYPNYKVIVLNDDFNTFRHVAACLMKYIPNMTSDRAWELTNQVHYEGQAIVWVGPQEQAELYHEQLLRAGLTMAPLEPGGS

SEQ ID NO: 6710 - protein, 95 aa, Thermosynechococcus elongatus
ASVVPQEGQQVTRKQYPNYKVIVLNDDFNTFQHVVACLKKYIPNMISDRAWELTNQVHYGGRAIVWVGPQEQAELYHEQLLRAGLTMAPLEPEGS

SEQ ID NO: 6711 - protein, 95 aa, Thermosynechococcus elongatus
ASVVPQEGQQVTRKQYPNYKVIVLNDDFNTFRHVVACLKKYIPNMISDRAWELTNQVHYGGRAIVWVGPQEQAELYHEQLLRAGLTMAPLEPEGS

SEQ ID NO: 6712 - protein, 95 aa, Thermosynechococcus elongatus
ASVVPQEGQQVTRKHKPNYKVIVLNDDFNTFQHVAACLMKYIPNMTSDRAWELTNQVHYEGQAIVWVGPQEQAELYHEQLLRAGLTMAPLEPEGS

SEQ ID NO: 6713 - protein, 95 aa, Thermosynechococcus elongatus; identical to SEQ ID NO: 1106

SEQ ID NO: 6714 - protein, 95 aa, Thermosynechococcus elongatus
ASVVPQEGQQVTRKHNPNYKVIVLNDDFNTFRHVAACLMKYIPNKTSDRAWELTNQVHYVGQAIVWVGPQERAELYHEQLLRAGLTMAPLEPEGS

SEQ ID NO: 6715 - protein, 95 aa, Thermosynechococcus elongatus
ASVVPQEGQQVTRKHNPNYNVIVLNDDFNTFQHCVACLKKYIPNMISDRAWELTNQVHYGGRAIVWVGPQEQAELYHEHLLRAGLTMAPLEPEGS

SEQ ID NO: 6716 - protein, 95 aa, Thermosynechococcus elongatus
ASVVPQEGQQVTRKHHPNYKVIVLNDDFNTFQHVVACLKKYIPNMTSDRAWELTNQVHYEGQAIVWVGPQVQAELYHEQLLRAGLTMAPLEPGGS

SEQ ID NO: 6717 - protein, 95 aa, Thermosynechococcus elongatus; identical to SEQ ID NO: 1855

SEQ ID NO: 6718 - protein, 95 aa, Thermosynechococcus elongatus
ASVVPQEGQQVTRKHHPNYKVIVLNDDFNTFRHVAACLMKYIPNKTSDRAWELTNQVHYEGQAIVWVGPQEQAELYHEQLLRAGLTMAPLEPEGS

SEQ ID NO: 6719 - protein, 95 aa, Thermosynechococcus elongatus
ASVVPQEGQQVTRKHHPNYKVIVLNDDFNTFRHVAACLMKYIPNMTSDRAWELTNQVHYEGQAIVWVGPQEQAELNHEQLLRAGLTMAPLEPEGS

SEQ ID NO: 6720 - protein, 95 aa, Thermosynechococcus elongatus
ASVVPQEGQQVTRKHHPNYKVIVLNDDFNTFRHVAACLMKYIPNMTSDRAWELTNQVHYEGQAIVWVGPQEQAEFYNEQLLRAGLTMAPLEPEGS

SEQ ID NO: 6721 - protein, 95 aa, Thermosynechococcus elongatus
ASVVPQEGQQVTRKHHPNYKVIVLNDDFNTFRHVAACLMKYIPNMTSDRAWELTNQVHYEGQAIVLVGPQEQAELYKEQLLRAGLTMAPLEPEGS

SEQ ID NO: 6722 - protein, 95 aa, Thermosynechococcus elongatus
ASVVPQEGQQVTRKHHPNYKVIVLNDDFNTFRHVAACLMKYIPNMTSDRAWELTNQVHYGGRAIVWVGPQEQAELYHEQLLRAGLTMAPLEPEGS

SEQ ID NO: 6723 - protein, 95 aa, Thermosynechococcus elongatus
ASVVPQEGQQVTRKHHPNYKVIVLNDDFNTFRHVAACLMKYIPNMTSDRAWELTNQVHYGGRAIVWVGPQEQAELYHEQLLRAGLTMAPLEPGGS

SEQ ID NO: 6724 - protein, 95 aa, Thermosynechococcus elongatus
ASVVPQEGQQVTRKHHPNYKVIVLNDDFNTFRHVAACLMKYIPNMTSDRAWELTNQVHYEGQAIVWVGPQVQAELYHEQLLRAGLTMAPLEPGGS

SEQ ID NO: 6725 - protein, 95 aa, Thermosynechococcus elongatus
ASVVPQEGQQVTRKHDPNYKVIVLNDDFNTFQHVVACLKKYIPNMISDRAWELTNQVHYGGRAIVWVGPQEQAELYHEQLLRAGLTMAPLEPEGS

SEQ ID NO: 6726 - protein, 95 aa, Thermosynechococcus elongatus
ASVVPQEGQQVTRKHDPNYKVIVLNDDFNTFRHVAACLMKYIPNMTSDRAWELTNQVHYKGQAIVWVGPQVQAELYHEQLLRAGLTMAPLEPGGS

SEQ ID NO: 6727 - protein, 21 aa, Thermosynechococcus elongatus
ASVVPQEGQQVTRKHYQTTRL

SEQ ID NO: 6728 - protein, 15 aa, Thermosynechococcus elongatus
ASVVPQEGQQVTRKH

SEQ ID NO: 6729 - protein, 36 aa, Thermosynechococcus elongatus
ASVVPQEGQQVTRKHYTNNKFIVLNDDFNTFRHVAA

SEQ ID NO: 6730 - protein, 59 aa, Thermosynechococcus elongatus
ASVVPQEGQQVTRKHYTNYKDIVLNDDFNTFQHVVACLKKYIPNMISDRAWELTNQVHY

SEQ ID NO: 6731 - protein, 95 aa, Thermosynechococcus elongatus
ASVVPQEGQQVTRKHYTNYKVIVLNDDFNTFQHVVACMKKYIPNMISDRAWELTNQVHYGGRAIVWVGPQEQAELYHEQLLRAGLTMAPLEPEGS

SEQ ID NO: 6732 - protein, 95 aa, Thermosynechococcus elongatus
ASVVPQEGQQVTRKHYTNYKVIVLNDDFNTYQHVAACLMKYITNMTSDRAWELTNQVHYEGQAIVWVGPQVQAELYHEQLLRACLTMAPLEPGGS

SEQ ID NO: 6733 - protein, 95 aa, Thermosynechococcus elongatus
ASVVPQEGQQVTRKHYTNYKVIVLNDDFNTFQHVVACLKKYIPNMISDRAWELTNQVHFGGRAIVWVGPQEQAELYHEQLLRAGLTMAPLEPEGS

SEQ ID NO: 6734 - protein, 95 aa, Thermosynechococcus elongatus
ASVVPQEGQQVTRKHYTNYKVIVLNDDFNTFQHVVACLKKYIPNMTSDRAWELTNQVHYEGQAIVWVGPQEQAELYHEQLLRTGLTMAPLEPEGS

SEQ ID NO: 6735 - protein, 95 aa, Thermosynechococcus elongatus
ASVVPQEGQQVTRKHYTNYKVIVLNDDFNTFQHVVACLKKYIPNMISDRAWELTNQVHYKGQAIVWVGPQEQAELYHEQLLRAGLTMAPLEPEGS

SEQ ID NO: 6736 - protein, 95 aa, Thermosynechococcus elongatus
ASVVPQEGQQVTRKHYTNYKVIVLNDDFNTFQHVVACLKKYIPNMISDRAWELTNQVHYEGQAIVWVGPQEQAELYHEQLLRAGLTMAPLEPEGS

SEQ ID NO: 6737 - protein, 95 aa, Thermosynechococcus elongatus
ASVVPQEGQQVTRKHYTNYKVIVLNDDFNTFQHVVACLKKYIPNMISDRAWELTNQVHYGGRAIVWVGPQEQAELYHEQLLRAGLTMAPLEPGGS

SEQ ID NO: 6738 - protein, 90 aa, Thermosynechococcus elongatus
ASVVPQEGQQVTRKHYTNYKVIVLNDDFNTFQHVVACLKKYIPNMISDRAWELTNQVHYGCRSIVCVCPQEQAELYHEQLMRAGLTMAPL

SEQ ID NO: 6739 - protein, 95 aa, Thermosynechococcus elongatus
ASVVPQEGQQVTRKHYTNYKVIVLNDDFNTFQHVVACLKKYIPNVISDRAWELTNQVHYGGRAIVWVGPQEQAELYHEQLLRAGLTMAPLEPEGS

SEQ ID NO: 6740 - protein, 95 aa, Thermosynechococcus elongatus
ASVVPQEGQQVTRKHYTNYKVIVLNDDFNTFQHVVSCLKKYIPNMISDRAWELTNQVHYGGRAIVWVGPQEQAELYHEQLLRDGLTMAPLEPEGS

SEQ ID NO: 6741 - protein, 95 aa, Thermosynechococcus elongatus
ASVVPQEGQQVTRKHYTNYKVIVLNDDFNTFRHVAACLMKYIPNKTSDRAWELTNQVHYEGQAIVWVGPQEQAELYHEQLLRAGLTMAPFEPEGS

SEQ ID NO: 6742 - protein, 95 aa, Thermosynechococcus elongatus
ASVVPQEGQQVTRKHYQNYKVIVLNDDFNTFQHVAACLMKYIPNKTSDRAWELTNQVHYEGQAIVWVGPQVQAELYHEQLLRAGLTMAPLEPGGS

SEQ ID NO: 6743 - protein, 95 aa, Thermosynechococcus elongatus
ASVVPQEGQQVTRKHYQNYKVIVLNDDFNTFQHVVACLKKYIPNMTSDRAWELTNQVHYEGQAIVWVGPQEQAELYHEQLLRAGLTMAPLEPEGS

SEQ ID NO: 6744 - protein, 95 aa, Thermosynechococcus elongatus
ASVVPQEGQQVTRKHYQNYKVIVLNDDFNTFQHVVACLMKYIPNMTSDRAWELTNQVHYEGQAIVWVGPQEQAELYHEQLLRAGLTMAPLEPEGS

SEQ ID NO: 6745 - protein, 95 aa, Thermosynechococcus elongatus
ASVVPQEGQQVTRKHYQNYKVIVLNDDFNTFRHVAACLMKYIPNMTSDRAWELTNQVHYEGQAIVWVGPQEQAELYHEQLLRAGLTMAPLEPEGS

SEQ ID NO: 6746 - protein, 95 aa, Thermosynechococcus elongatus
ASVVPQEGQQVTRKHYQNYKVIVLNDDFNTFRHVAACLMKYIPNMTSDRAWELTNQVHYEGQAIVWVGPQVQAELYHEQLLRAGLTMAPLEPGGS

SEQ ID NO: 6747 - protein, 95 aa, Thermosynechococcus elongatus
ASVVPQEGQQVTRKHYQNYKVIVLNDDFNTFRHVAACLMKYIPNMTSDRAWELTNQVHYKGQAIVWVGPQEQAELNHEQLLRAGLTMAPLEPEGS

SEQ ID NO: 6748 - protein, 95 aa, Thermosynechococcus elongatus
ASVVPQEGQQVTRKHYPNNKVIDLNDDFNTFQHYAACLMKYITNMTSERDCELTNQVHYEGQAIFCVGPQEQADLYHDQLLRDGLSMATLEPEGS

SEQ ID NO: 6749 - protein, 95 aa, Thermosynechococcus elongatus
ASVVPQEGQQVTRKHYPNNKVIVLNEDFNTFQHVVACLKKYIPNMISDRAWELTNQVHYGGRAIVWVGPQEQAELYHEQLLRAGLTMAPLEPEGS

SEQ ID NO: 6750 - protein, 95 aa, Thermosynechococcus elongatus
ASVVPQEGQQVTRKHYPNNKVIVLNDDINTFQHVVACLKKYIPNMISDRAWELTNQVHYGGRAIVWVGPQEQAELYHEQLLRAGLTRAPLEPEGS

SEQ ID NO: 6751 - protein, 95 aa, Thermosynechococcus elongatus
ASVVPQEGQQVTRKHYPNNKVIVLNDDFNTFRHVAACLMKYIPNKTSDRAWELTNQVHYGGRAIVWVGPQEQAELYHEQLLRAGLTMAQLEPEGS

SEQ ID NO: 6752 - protein, 95 aa, Thermosynechococcus elongatus
ASVVPQEGQQVTRKHYPNNKVIVLNDYFNTYRHVAACLMKYIPNKTSDRAWELTNQLQYEGLAIVWVGTQEQAELYHELFLIAGLTMATLEPEGS

SEQ ID NO: 6753 - protein, 95 aa, Thermosynechococcus elongatus
ASVVPQEGQQVTRKHYPNNKFIVLNDDFNTIQHVVASLKKYIPNMISDRAWELTNQVHYGGRAIVWVGPQEQAELYHEQLLRAGLTMAPLEPEGS

SEQ ID NO: 6754 - protein, 95 aa, Thermosynechococcus elongatus
ASVVPQEGQQVTRKHYPNHKVIVLNDDFNTFQHVVACLKKYIPNMISDRAWELTNQVHYGGRAIVWVGPQEQAELYHEQLLRAGLTMAPLEPEGS

SEQ ID NO: 6755 - protein, 18 aa, Thermosynechococcus elongatus
ASVVPQEGQQVTRKHYPN

SEQ ID NO: 6756 - protein, 18 aa, Thermosynechococcus elongatus
ASVVPQEGQQVTRKHYPN

SEQ ID NO: 6757 - protein, 95 aa, Thermosynechococcus elongatus; identical to SEQ ID NO: 1171

SEQ ID NO: 6758 - protein, 95 aa, Thermosynechococcus elongatus; identical to SEQ ID NO: 17

SEQ ID NO: 6759 - protein, 95 aa, Thermosynechococcus elongatus; identical to SEQ ID NO: 17

SEQ ID NO: 6760 - protein, 77 aa, Thermosynechococcus elongatus
ASVVPQEGQQVTRKHYPNYNVIVLNDDFNTFRHVAASLMKYIPNKTSDRAWELTNHVLYEGLAIVWVCPLEQAELYH

SEQ ID NO: 6761 - protein, 95 aa, Thermosynechococcus elongatus
ASVVPQEGQQVTRKHYPNYKIIVLNDDFNTFQHVVACLKKYIPNMISDRAWELTNQVHYGGRAIVWVGPQEQAELYHEQLLRAGLTMAPLEPEGS

SEQ ID NO: 6762 - protein, 95 aa, Thermosynechococcus elongatus
ASVVPQEGQQVTRKHYPNYKLIVLNDDFNTFQHVVACLKKYIPNMISDRAWELTNQVHYGGRAIVWVGPQEQAELYHEQLLRAGLTMAPLEPEGS

SEQ ID NO: 6763 - protein, 95 aa, Thermosynechococcus elongatus
ASVVPQEGQQVTRKHYPNYKDIVLNDDFNTIQHVVACLKKYIPHMISDRAWELTNQVLYGGRAIVWVGPQDQAELYLEQLLRAGLTMAPLEPEGS

SEQ ID NO: 6764 - protein, 95 aa, Thermosynechococcus elongatus
ASVVPQEGQQVTRKHYPNYKDIVLNDDFNTIQHVVACLKKYIPNMISDRAWELTNQVHYGGRAIVWVGPQEQAELYHEQLLRAGLTMAPLEPEGS

SEQ ID NO: 6765 - protein, 95 aa, Thermosynechococcus elongatus
ASVVPQEGQQVTRKHYPNYKDIVLNDDFNTIQHVVACLKKYIPNMISDRAWELTNQVHSGGRAIVWVGPQEQAELYHEQLLRAGLTMAPLEPEGS

SEQ ID NO: 6766 - protein, 95 aa, Thermosynechococcus elongatus
ASVVPQEGQQVTRKHYPNYKDIVLNDDFNTIQHVVACLKKYIPYMISDRAWELTNHVHYGGRAIVWVGPQELAELYHEHLLRAGLTMATLEAEGS

SEQ ID NO: 6767 - protein, 95 aa, Thermosynechococcus elongatus
ASVVPQEGQQVTRKHYPNYKDIVLNDDFNTYRHVAACLMKYIPNMTSDRAWELTNQVHFEGQAIVWVGPQEQAELYHEQLLRAGLTMAPLEPEGS

SEQ ID NO: 6768 - protein, 95 aa, Thermosynechococcus elongatus
ASVVPQEGQQVTRKHYPNYKDIVLNDDFNTFQHVVACLKKYITNMISDRAWELTNQVHYGGRAIVWVGPQEQAELYHEQLLRAGLTMAPLEPEGS

SEQ ID NO: 6769 - protein, 95 aa, Thermosynechococcus elongatus
ASVVPQEGQQVTRKHYPNYKDIVLNDDFNTFQHVVACLKKYIPNMISDRACELTNQVHYGGRAIVWVGPQEQAELYHEQLLRAGLTMAPLEPEGS

SEQ ID NO: 6770 - protein, 95 aa, Thermosynechococcus elongatus
ASVVPQEGQQVTRKHYPNYKDIVLNDDFNTFQHVVACLKKYIPNMISDRAWELTNQLHYGGRAIVWVGPQEQAELYHEQLLRAGLTMSPLDPEGS

SEQ ID NO: 6771 - protein, 58 aa, Thermosynechococcus elongatus
ASVVPQEGQQVTRKHYPNYKDIVLNDDFNTFQHVVACLKKYIPNMISDRAWELTNQVH

SEQ ID NO: 6772 - protein, 95 aa, Thermosynechococcus elongatus; identical to SEQ ID NO: 496

SEQ ID NO: 6773 - protein, 95 aa, Thermosynechococcus elongatus
ASVVPQEGQQVTRKHYPNYKDIVLNDDFNTFQHVVACLKKYIPNMISDRAWELTNQVHYGCRAIVWVGPQEQAELYHEQLLRAGLTMAPLEPEGS

SEQ ID NO: 6774 - protein, 92 aa, Thermosynechococcus elongatus
ASVVPQEGQQVTRKHYPNYKDIVLNDDFNTFQHVVACLKKYIPNMISDRAWDLTNQVHYGGRAIVWVGPQEQAELFHEQLLRAGLTMAPLEP

SEQ ID NO: 6775 - protein, 51 aa, Thermosynechococcus elongatus
ASVVPQEGQQVTRKHYPNYKDIVLNDDFNTFQHVVACLKKYIPNMISDRAW

SEQ ID NO: 6776 - protein, 51 aa, Thermosynechococcus elongatus; identical to SEQ ID NO: 6775

SEQ ID NO: 6777 - protein, 95 aa, Thermosynechococcus elongatus
ASVVPQEGQQVTRKHYPNYKDIVLNDDFNTFQHFDACLKKYIPNMISDRAWELTNQVHYGGRAIVWVGPQELAELYHELLLSAGLTMAPLEPEGS

SEQ ID NO: 6778 - protein, 36 aa, Thermosynechococcus elongatus
ASVVPQEGQQVTRKHYPNYKDIVLNDDFNTFQHFVA

SEQ ID NO: 6779 - protein, 95 aa, Thermosynechococcus elongatus
ASVVPQEGQQVTRKHYPNYKDIVLNDDFNTFRHVAACLMKYIPNMTSDRAWELTNQVHYEGQAIVWVGPQVQAELYHEQLLRAGLTMAPLEPGGS

SEQ ID NO: 6780 - protein, 52 aa, Thermosynechococcus elongatus
ASVVPQEGQQVTRKHYPNYKDIVLNDDFYTFQHVVACLKKYIPNMISDRAWE

SEQ ID NO: 6781 - protein, 95 aa, Thermosynechococcus elongatus
ASVVPQEGQQVTRKHYPNYKDIFLKDDFNTLQHVVACMKKYIPNMISDRAWELTNPVHYGGRAIVWVGPQEQAELYHEQLLRAGLTMAPLEPGGS

SEQ ID NO: 6782 - protein, 95 aa, Thermosynechococcus elongatus
ASVVPQEGQQVTRKHYPNYKAIVLNDDFNTFQHVVACLKKYIPNMISDRAWELTNQVHYGGRAIVWVGPQEQAELYHEQLLRAGLTMAPLEPEGS

SEQ ID NO: 6783 - protein, 95 aa, Thermosynechococcus elongatus; identical to SEQ ID NO: 6782

SEQ ID NO: 6784 - protein, 95 aa, Thermosynechococcus elongatus
ASVVPQEGQQVTRKHYPNYKGIVLNDDFNTIQHVVACLKKYIPNMISDRAWELTNQVHYGGRAIVWVGPQEQAELYHEQLLRAGLTMAPLEPEGS

SEQ ID NO: 6785 - protein, 95 aa, Thermosynechococcus elongatus
ASVVPQEGQQVTRKHYPNYKGIVLNDDFNTFQQVVACLKKYIPNMISDRAWELTNQVHYGGRAIVCVGPQEQAELYHEQLLRAGLTMAPLEPEGS

SEQ ID NO: 6786 - protein, 37 aa, Thermosynechococcus elongatus
ASVVPQEGQQVTRKHYPNYKGIVLNDDFNTFQHVVAC

SEQ ID NO: 6787 - protein, 95 aa, Thermosynechococcus elongatus; identical to SEQ ID NO: 251

SEQ ID NO: 6788 - protein, 95 aa, Thermosynechococcus elongatus
ASVVPQEGQQVTRKHYPNYKGIVLNDDFNTFQHVVACLKKYIPNMISDRAWELTNQVHYGGRAIVWVGPQEQAELYHEQLLRAGLIMAPLEPEGS

SEQ ID NO: 6789 - protein, 95 aa, Thermosynechococcus elongatus
ASVVPQEGQQVTRKHYPNYKGIVLNDDFNTFQHVVACLKKYIPNMISDRAWELTNQVHYGGRAIVWVGPQEQAEFYHEQLLRAGLTMAPLEPEGS

SEQ ID NO: 6790 - protein, 95 aa, Thermosynechococcus elongatus
ASVVPQEGQQVTRKHYPNYKGIVLNDDFNTFQHVVACLKKYIPNMISDRAWELTNQVHFGGRAIVWVGPQEQAELYHEQLLRAGLTMATLEPEGS

SEQ ID NO: 6791 - protein, 95 aa, Thermosynechococcus elongatus
ASVVPQEGQQVTRKHYPNYKGIVLNDDFNTFRHVAACLKKYIPNKTSDRAWELTNQVHYEGQAIVWVGPQEQAELYHEQLLRAGLTMAPLEPEGS

SEQ ID NO: 6792 - protein, 95 aa, Thermosynechococcus elongatus
ASVVPQEGQQVTRKHYPNYKGIVLNDDFNTFRHVAACLMKYIPNKTSDRAWELTNQVHYEGQAIVWVGPQEQAELYHEQLLRAGLTMAPLEPEGS

SEQ ID NO: 6793 - protein, 95 aa, Thermosynechococcus elongatus
ASVVPQEGQQVTRKHYPNYKGIVLNDDFNTFRHVAACLMKYIPNMTSDRAWELTNQVHYEGQAIVWVGPQVQAELYHEQLLRAGLTMAQLEPGGS

SEQ ID NO: 6794 - protein, 95 aa, Thermosynechococcus elongatus
ASVVPQEGQQVTRKHYPNYKGIVLNDDFNTFRHVAACLMKYIPNMTSDRAWELTNQVHYVGQAIVWVGPQEQAELYHEQLLRAGLTIAPLEPKGS

SEQ ID NO: 6795 - protein, 95 aa, Thermosynechococcus elongatus
ASVVPQEGQQVTRKHYPNYKGIVLNDDFTTFHHVVACLKKYIPNMISDRAWELTNLVHYGGRAIVWVGPQEQAELYHEQLLRAGLTMAPLEPEGS

SEQ ID NO: 6796 - protein, 95 aa, Thermosynechococcus elongatus; identical to SEQ ID NO: 99

SEQ ID NO: 6797 - protein, 95 aa, Thermosynechococcus elongatus; identical to SEQ ID NO: 1

SEQ ID NO: 6798 - protein, 95 aa, Thermosynechococcus elongatus
ASVVPQEGQQVTRKHYPNYKVIGLNDDFNTFQHVGACLKKYIPNMISDRAWELTNQVHYKGQAIVWVGPPEPAELNHEQLLRAGLTMAPLEPEGS

SEQ ID NO: 6799 - protein, 95 aa, Thermosynechococcus elongatus
ASVVPQEGQQVTRKHYPNYKVIVLNDDFNTFQHGVACLKKYIPNMISDRAWELTNQVHYGGRVIVWVGPQEQAELYHEQLLRAGLTMAPLEPEGS

SEQ ID NO: 6800 - protein, 95 aa, Thermosynechococcus elongatus; identical to SEQ ID NO: 1

SEQ ID NO: 6801 - protein, 95 aa, Thermosynechococcus elongatus; identical to SEQ ID NO: 122

SEQ ID NO: 6802 - protein, 95 aa, Thermosynechococcus elongatus; identical to SEQ ID NO: 123

SEQ ID NO: 6803 - protein, 95 aa, Thermosynechococcus elongatus; identical to SEQ ID NO: 94

SEQ ID NO: 6804 - protein, 95 aa, Thermosynechococcus elongatus; identical to SEQ ID NO: 43

SEQ ID NO: 6805 - protein, 95 aa, Thermosynechococcus elongatus; identical to SEQ ID NO: 22

SEQ ID NO: 6806 - protein, 74 aa, Thermosynechococcus elongatus
ASVVPQEGQQVTRKHYPNYKVIVLNDDFNTFQHVVACLKKYIPNMISDRAWELTNQVHYGGRAIVWVGPQEQAE

SEQ ID NO: 6807 - protein, 95 aa, Thermosynechococcus elongatus; identical to SEQ ID NO: 800

SEQ ID NO: 6808 - protein, 95 aa, Thermosynechococcus elongatus; identical to SEQ ID NO: 1916

SEQ ID NO: 6809 - protein, 95 aa, Thermosynechococcus elongatus
ASVVPQEGQQVTRKHYPNYKVIVLNDDFNTFQHVVACLKKYIPNMISDRAWELTNQVHYGGRAIVWVGPQVQAELYHEHLLRAGLTMAPLEPEGS

SEQ ID NO: 6810 - protein, 70 aa, Thermosynechococcus elongatus; identical to SEQ ID NO: 508

SEQ ID NO: 6811 - protein, 90 aa, Thermosynechococcus elongatus
ASVVPQEGQQVTRKHYPNYKVIVLNDDFNTFQHVVACLKKYIPNMISDRAWELTNHVHYGGRAIVWVGPQEQAELYHEQLLRAGLTMAPL

SEQ ID NO: 6812 - protein, 95 aa, Thermosynechococcus elongatus; identical to SEQ ID NO: 825

SEQ ID NO: 6813 - protein, 95 aa, Thermosynechococcus elongatus; identical to SEQ ID NO: 134

SEQ ID NO: 6814 - protein, 95 aa, Thermosynechococcus elongatus; identical to SEQ ID NO: 1977

SEQ ID NO: 6815 - protein, 77 aa, Thermosynechococcus elongatus
ASVVPQEGQQVTRKHYPNYKVIVLNDDFNTFRHVAACLKKYIPNMISDRAWELTNQVHYEGQAIVWVGPQEQAELYH

SEQ ID NO: 6816 - protein, 95 aa, Thermosynechococcus elongatus
ASVVPQEGQQVTRKHYPNYKVIVLNDDFNTFRHVAACLMKYIPNKTSDRAWELTNQVHYEGQAIVWVGPQEQAGLYHEQLLRAGLTMAPLEPEGS

SEQ ID NO: 6817 - protein, 95 aa, Thermosynechococcus elongatus; identical to SEQ ID NO: 11

SEQ ID NO: 6818 - protein, 95 aa, Thermosynechococcus elongatus; identical to SEQ ID NO: 106

SEQ ID NO: 6819 - protein, 95 aa, Thermosynechococcus elongatus; identical to SEQ ID NO: 86

SEQ ID NO: 6820 - protein, 95 aa, Thermosynechococcus elongatus; identical to SEQ ID NO: 17

SEQ ID NO: 6821 - protein, 74 aa, Thermosynechococcus elongatus
ASVVPQEGQQVTRKHYPNYKVIFLNDDFNTFKHVVACLKKYIPNMISDRAWALTNQGHYGGRAIVWVGPQEQAE

SEQ ID NO: 6822 - protein, 95 aa, Thermosynechococcus elongatus
ASVVPQEGQQVTRKHYPNYKVKVLNDDFNTFQHVVACLKKYIPNMISDRAWELTNQVHYGGRAIVWVGPQEQAELYHEQLLRAGLTMAPLEPEGS

SEQ ID NO: 6823 - protein, 95 aa, Thermosynechococcus elongatus; identical to SEQ ID NO: 788

SEQ ID NO: 6824 - protein, 95 aa, Thermosynechococcus elongatus
ASVVPQEGQQVTRKHYPNYKVRVLNDDFNTVPHVAACVMKYIPNMTSDRAWELTNQVHYEGRAIVWVGPQEQAELYHEQLLRAGLTMAPLEPEGS

SEQ ID NO: 6825 - protein, 95 aa, Thermosynechococcus elongatus
ASVVPQEGQQVTRKHYPNYKVRVLNDDFNTFQHVVACLKKYIPNMISDRAWELTNQVHYGGRAIVWVGPQEQAELYHEQLLRAGLTMAPLEPGGS

SEQ ID NO: 6826 - protein, 95 aa, Thermosynechococcus elongatus
ASVVPQEGQQVTRKHYPNYKVRVLNDDFNSFPHVVACLKKYIPNMISDRAWELTNQVHYGGRAIVWVGPQEQAELYHEQLLRAGLTMAPLEPEGS

SEQ ID NO: 6827 - protein, 95 aa, Thermosynechococcus elongatus
ASVVPQEGQQVTRKHYPNYKVIILNDDFNTFQHVAACLMKYIPNMTSDRAWELTNQVNYEGQAIVRVGPQEQAELYHKQLLRAGLTMTPLEPEGS

SEQ ID NO: 6828 - protein, 95 aa, Thermosynechococcus elongatus
ASVVPQEGQQVTRKHYPNYKVIILNDDFNTFQHVAACLMKYIPNMTSDRAWELTNQVHYEGQAIVRVGPQEQAELYHKQLLRAGLTMATLEPEGS

SEQ ID NO: 6829 - protein, 95 aa, Thermosynechococcus elongatus
ASVVPQEGQQVTRKHYPNYKVIILNDDFNTFQHVAACLMKYIPNMTSDRAWELTNQVHYEGQAIVRVGPQEQAELYHEQLLRAGLTMAPLEPEGS

SEQ ID NO: 6830 - protein, 95 aa, Thermosynechococcus elongatus
ASVVPQEGQQVTRKHYPNYKVIILNDDFNTFQHVAACLMKYIPNMTSDRAWELTNQVHYEGQAIVWVGPQEQAELYHEQLLRAGLTMAPLEPEGS

SEQ ID NO: 6831 - protein, 95 aa, Thermosynechococcus elongatus
ASVVPQEGQQVTRKHYPNYKVIILNDDFNTFQHVAACLMKYIPNMTSDGAWELTNQVHYEGQAIVRVGPQEQAELYHKQLLRAGLTMAPLEPEGS

SEQ ID NO: 6832 - protein, 95 aa, Thermosynechococcus elongatus
ASVVPQEGQQVTRKHYPNYKVIILNDDFNTFQHVAACLMKYIPNMISDRAWELTNQVHYEGQAIVWVGPQEQAELYHEQLLRAGLTMAPLEPEGS

SEQ ID NO: 6833 - protein, 95 aa, Thermosynechococcus elongatus
ASVVPQEGQQVTRKHYPNYKVIILNDDFNTFRHVAACLKKYIPNMISDRAWELTNQVHYGGRAIVWVGPQEQAELYHEQLLRAGLTMAPLEPEGS

SEQ ID NO: 6834 - protein, 36 aa, Thermosynechococcus elongatus
ASVVPQEGQQVTRKHYPNYKVIDLNDDFNTFQHDDA

SEQ ID NO: 6835 - protein, 36 aa, Thermosynechococcus elongatus
ASVVPQEGQQVTRKHYPNYKVIDLNDDFNTFQHVVA

SEQ ID NO: 6836 - protein, 95 aa, Thermosynechococcus elongatus
ASVVPQEGQQVTRKHYPNYKVIALNDDFNTFQHVVACLKKYIPNMISDRAWELTNQVHYGGRAIVWVGPQEQAELYHEQLLRAGLTMAPLEPEGS

SEQ ID NO: 6837 - protein, 95 aa, Thermosynechococcus elongatus
ASVVPQEGQQVTRKHYPNYKVIGLNDDFNTFQHGVACLKKYIPNMISDRAWDLTNHVHYGGRAIVWVGPQEQAELYHEHLLRAGLTMAPLEPEGS

SEQ ID NO: 6838 - protein, 95 aa, Thermosynechococcus elongatus
ASVVPQEGQQVTRKHYPNYKVIGLNDDFNTFQHVVACLKKYIPNMISDRAWELTNQVHYGGRAIVWVGPQEQAELYHEQLLRAGLTMAPLEPGGS

SEQ ID NO: 6839 - protein, 95 aa, Thermosynechococcus elongatus
ASVVPQEGQQVTRKHYPNYKVIGLNDDFNTFRHVAACLMKYIPNKTSDRAWELTNQVHYEGQAIVWVGPQEQAELSHEHLVRAGLTLAPLEPEGS

SEQ ID NO: 6840 - protein, 95 aa, Thermosynechococcus elongatus
ASVVPQEGQQVTRKHYPNYKVIGLNDDFNTFRHVAACLMKYIPNMTSDRAWELTNQVHYEGQAIVWVGPREQAELYHEQLLRVGLTMAPLEPEGS

SEQ ID NO: 6841 - protein, 95 aa, Thermosynechococcus elongatus; identical to SEQ ID NO: 22

SEQ ID NO: 6842 - protein, 95 aa, Thermosynechococcus elongatus; identical to SEQ ID NO: 30

SEQ ID NO: 6843 - protein, 95 aa, Thermosynechococcus elongatus
ASVVPQEGQQVTRKHYPNYKVIVLNDDVNTFQHVVACLKKYIPNMISDRAWELTNQVHYGGRAIVWVGPQERAELYHEQLLRAGLTMAPLEPEGS

SEQ ID NO: 6844 - protein, 95 aa, Thermosynechococcus elongatus; identical to SEQ ID NO: 75

SEQ ID NO: 6845 - protein, 95 aa, Thermosynechococcus elongatus
ASVVPQEGQQVTRKHYPNYKVIVLNDDFNTFQHVVACLKKYIPNMMSDRAWELTNQVHYGGRAIVWVGPQEQAELYHEQLLRAGLTLAPLEPEGS

SEQ ID NO: 6846 - protein, 95 aa, Thermosynechococcus elongatus; identical to SEQ ID NO: 148

SEQ ID NO: 6847 - protein, 95 aa, Thermosynechococcus elongatus; identical to SEQ ID NO: 1

SEQ ID NO: 6848 - protein, 95 aa, Thermosynechococcus elongatus; identical to SEQ ID NO: 273

SEQ ID NO: 6849 - protein, 95 aa, Thermosynechococcus elongatus; identical to SEQ ID NO: 623

SEQ ID NO: 6850 - protein, 95 aa, Thermosynechococcus elongatus; identical to SEQ ID NO: 430

SEQ ID NO: 6851 - protein, 37 aa, Thermosynechococcus elongatus
ASVVPQEGQQVTRKHYPNYKVIVLNDDFNTFRHVAAC

SEQ ID NO: 6852 - protein, 95 aa, Thermosynechococcus elongatus; identical to SEQ ID NO: 192

SEQ ID NO: 6853 - protein, 95 aa, Thermosynechococcus elongatus
ASVVPQEGQQVTRKHYPNYKVIVMNDDFNTFQHGVACLMKYIPNMTSDRACELTNQVLYEGQAIVWVGPQVQAELYHEQLLRAGLTMAPLEPGGS

SEQ ID NO: 6854 - protein, 95 aa, Thermosynechococcus elongatus
ASVVPQEGQQVTRKHYPNYKVIVMNDDFNTFQHVVACLKKYIPNMISDRAWELTNQVHYGGRAIVWVGPQEQAELYHEQLLRAGLTMAPLEPEGS

SEQ ID NO: 6855 - protein, 95 aa, Thermosynechococcus elongatus
ASVVPQEGQQVTRKHYPNYKVIVMNDDFNTFRHVAACLMKYIPNMTSDRAWELTNQVHYEGQAIVWVGPQEQAELYHEQLLRAGLTMAPLEPEGS

SEQ ID NO: 6856 - protein, 95 aa, Thermosynechococcus elongatus; identical to SEQ ID NO: 50

SEQ ID NO: 6857 - protein, 95 aa, Thermosynechococcus elongatus
ASVVPQEGQQVTRKHYPNYKVIVLNDDFNTFQHVVACLKKYIPNMISDRAWELTNQVYYGGRAIVWVGPQEQAESYHEQLLRAGLTMAPLEPEGS

SEQ ID NO: 6858 - protein, 95 aa, Thermosynechococcus elongatus
ASVVPQEGQQVTRKHYPNYKVIVVNDDFNTFQHVVACLKKYIPNMISDRAWELTNQVHYGGRAIVWVGPQAQAELYHEQLLRAGLTMAPQEPEGS

SEQ ID NO: 6859 - protein, 95 aa, Thermosynechococcus elongatus
ASVVPQEGQQVTRKHYPNYKVIVVNDDFNTFQHVVACLKKYIPNMISDRAWELTNQVHYGGRAIVWVGPQEQAELYHEQLLRAGLTMAPLEPEGS

SEQ ID NO: 6860 - protein, 23 aa, Thermosynechococcus elongatus
ASVVPQEGQQVTRKHYPNYKVIV

SEQ ID NO: 6861 - protein, 95 aa, Thermosynechococcus elongatus
ASVVPQEGQQVTRKHYPNYKVIVSNDDFNTFQHVAACLKKYIPNMISDRAWELTNQVHYGGRAIVWVGPQEQAELYHEQLLRAGLTMAPLEPEGS

SEQ ID NO: 6862 - protein, 95 aa, Thermosynechococcus elongatus
ASVVPQEGQQVTRKHYPNYKVIVSNDDFNTFQHVVACLKKYIPNMISERAWELTNQVHYGGRAIVWVGPQEQAELYHEQLLRAGLTMAPLEPEGS

SEQ ID NO: 6863 - protein, 95 aa, Thermosynechococcus elongatus
ASVVPQEGQQVTRKHYPNYKVIVSNDDFNTFRHVAACLMKYIPNMTSDRAWELTNQVHYEGQAIVWVGPQVQAELYHEQLLRAGLTMAPLEPGGS

SEQ ID NO: 6864 - protein, 95 aa, Thermosynechococcus elongatus
ASVVPQEGQQVTRKHYPNYKVIVSNDDFNTFRHVAACLMKYIPNMTSDRAWELTNQVHYKGQAIVWVGPQEQAELNHEQLLRAGLTMAPLEPEGS

SEQ ID NO: 6865 - protein, 95 aa, Thermosynechococcus elongatus
ASVVPQEGQQVTRKHYPNYKVIVWNDDFNTFQHVVACLKKYIPNMISDRAWELTNQVHYEGQAIVWVGPQVQAELYHEQLLRAGLTMAPLEPGGS

SEQ ID NO: 6866 - protein, 95 aa, Thermosynechococcus elongatus
ASVVPQEGQQVTRKHYPNYKVIVWNDDFNTFQHVVACLKKYIPNMISDRAWELTNQVHYGGRAIVWVGPQEQAELYHEQLLRAGLTMAPLEPEGS

SEQ ID NO: 6867 - protein, 95 aa, Thermosynechococcus elongatus; identical to SEQ ID NO: 69

SEQ ID NO: 6868 - protein, 95 aa, Thermosynechococcus elongatus
ASVVPQEGQQVTRKHYPNYKVIVLKDDFNTYKHVVACLKKYIPNMISDRGWELTKQVHYGGRAIVWVGPQEQAELYHEQFLRSGFTMAPLEPEGS

SEQ ID NO: 6869 - protein, 36 aa, Thermosynechococcus elongatus
ASVVPQEGQQVTRKHYPNYKVIVLKDDFNTFQHVVA

SEQ ID NO: 6870 - protein, 95 aa, Thermosynechococcus elongatus
ASVVPQEGQQVTRKHYPNYKVIVLKDDFNTFQHVVACLKKYIPNMTSDRAWELTNQVHYEGQAIVWVGPQEQAELYHEQLLRTGLTMAPLEPEGS

SEQ ID NO: 6871 - protein, 95 aa, Thermosynechococcus elongatus
ASVVPQEGQQVTRKHYPNYKVIVLKDDFNTFQHVVACLKKYIPNMISDRAWELTNQVHYEGQAIVWVGPQEQAELYHEQLLRAGLTMAPLEPEGS

SEQ ID NO: 6872 - protein, 95 aa, Thermosynechococcus elongatus
ASVVPQEGQQVTRKHYPNYKVIVLKDDFNTFQHVVACLKKYIPNMISDRAWELTNQVHYGGRAIVWVGPQEQAELYHEQLLRAGLTMAPLEPGGS

SEQ ID NO: 6873 - protein, 58 aa, Thermosynechococcus elongatus
ASVVPQEGQQVTRKHYPNYKVIVLKDDFNTFRHVAACLMKYIPNMTSDRAWELTNQVH

SEQ ID NO: 6874 - protein, 95 aa, Thermosynechococcus elongatus
ASVVPQEGQQVTRKHYPNYKVIVLKDDFNTFRHVAACLMKYIPNMTSDRAWELTNQVHYEGQAIVWVGPQEQAELYHEQLLRAGLTMAPFEPEGS

SEQ ID NO: 6875 - protein, 95 aa, Thermosynechococcus elongatus
ASVVPQEGQQVTRKHYPNYKVIVLKDYFNTYQHDVACLKKYITNMISDRAWELTNQVHYGGRSIVWVGPQEQAELYHEQLLRAGLTMAPLEAEGS

SEQ ID NO: 6876 - protein, 95 aa, Thermosynechococcus elongatus
ASVVPQEGQQVTRKHYPNYKVIVLNEDFNTFQHVVACLMKYIPNMTSDRAWELTNQVHYKGQAIVWVGPQEQAELNHEQLLRAGLTMAPLEPGGS

SEQ ID NO: 6877 - protein, 95 aa, Thermosynechococcus elongatus
ASVVPQEGQQVTRKHYPNYKVIVLNDNFNTFQHVVACLKKYIPNMISDRAWELTNQVHYEGQAIVWVGPQEQAELYHEQLLRAGLTMAPLEPEGS

SEQ ID NO: 6878 - protein, 95 aa, Thermosynechococcus elongatus
ASVVPQEGQQVTRKHYPNYKVIVLNDDINTFQHVVACLKKYIPNMISDRAWELTNQVHYGGRAIVWVGPQEQAELYHEQLLRAGLTMAPLEPEGS

SEQ ID NO: 6879 - protein, 95 aa, Thermosynechococcus elongatus
ASVVPQEGQQVTRKHYPNYKVIVLNDDYNTFQHVVACLKKYITNMISDRAWELTNQVHYGGRAIVWVCPQEQAELYHEQLLRAGLTMAPLEPEGS

SEQ ID NO: 6880 - protein, 95 aa, Thermosynechococcus elongatus
ASVVPQEGQQVTRKHYPNYKVIVLNDDYNTFQHVVACLKKYIPNMISDRAWELTNQVHYKGQAILLLGPQEQAELNHEQLVRAGLTMAPLEPEGS

SEQ ID NO: 6881 - protein, 95 aa, Thermosynechococcus elongatus
ASVVPQEGQQVTRKHYPNYKVIVLNDDYNTFQHVVACLKKYIPNMISDRAWELTNQVHFGGRAIVWVGPQEQAELYHEQLLRAGLTMAPLEPEGS

SEQ ID NO: 6882 - protein, 95 aa, Thermosynechococcus elongatus
ASVVPQEGQQVTRKHYPNYKVIVLNDDSNTFRHVAACLMKYIPNMTSDRAWELTNQVHYEGQAIVWVGPREQAELYHEHLLRAGLTMAPLEPEGS

SEQ ID NO: 6883 - protein, 34 aa, Thermosynechococcus elongatus
ASVVPQEGQQVTRKHYPNYKVIVLNDDFNTLLHA

SEQ ID NO: 6884 - protein, 37 aa, Thermosynechococcus elongatus
ASVVPQEGQQVTRKHYPNYKVIVLNDDLTLSNTLLHA

SEQ ID NO: 6885 - protein, 95 aa, Thermosynechococcus elongatus
ASVVPQEGQQVTRKHYPNYKVIVLNDDLNTFQHVVACLKKYIPNMISDRAWELTNQVHYGGRAIVWVGPQEQAELYHEQLLRAGLTMAPLEPGGS

SEQ ID NO: 6886 - protein, 95 aa, Thermosynechococcus elongatus
ASVVPQEGQQVTRKHYPNYKVIVLNDDLNTFRHVAACLMKYIPNKTSDRAWELTNQVHYEGQAIVWVGQQEQAELYHEQLLRAGLTMAPLEPEGS

SEQ ID NO: 6887 - protein, 95 aa, Thermosynechococcus elongatus
ASVVPQEGQQVTRKHYPNYKVIVLNDDLNTFRHVAACLMKYIPNMTSDRAWELTNQVHYEGQAIVWVGPQEQAELYHEQLLRAGLTMAPLEPEGS

SEQ ID NO: 6888 - protein, 37 aa, Thermosynechococcus elongatus
ASVVPQEGQQVTRKHYPNYKVIVLNDDFTLSNTLLHA

SEQ ID NO: 6889 - protein, 36 aa, Thermosynechococcus elongatus
ASVVPQEGQQVTRKHYPNYKVIVLNDDFKTFQHVVA

SEQ ID NO: 6890 - protein, 95 aa, Thermosynechococcus elongatus
ASVVPQEGQQVTRKHYPNYKVIVLNDDFKTFRHVAACLMKYIPNMTSDRAWELTNQVHYEGQAIVWVGPQEQAELYHEQLLRAGLTMAPLEPGGS

SEQ ID NO: 6891 - protein, 46 aa, Thermosynechococcus elongatus
ASVVPQEGQQVTRKHYPNYKVIVLNDDFNTPTRCCMLEEVHPKHDF

SEQ ID NO: 6892 - protein, 37 aa, Thermosynechococcus elongatus
ASVVPQEGQQVTRKHYPNYKVIVLNDDFNTSNTLLHA

SEQ ID NO: 6893 - protein, 95 aa, Thermosynechococcus elongatus; identical to SEQ ID NO: 1

SEQ ID NO: 6894 - protein, 95 aa, Thermosynechococcus elongatus; identical to SEQ ID NO: 30

SEQ ID NO: 6895 - protein, 95 aa, Thermosynechococcus elongatus; identical to SEQ ID NO: 1

SEQ ID NO: 6896 - protein, 95 aa, Thermosynechococcus elongatus
ASVVPQEGQQVTRKHYPNYKVIVLNDDFNTNQHQQPTMKKYIPNMISDRAWELTNQVHYGGRAIVWVGPQEQAELYHEQLLRAGLTMAPLEPGGS

SEQ ID NO: 6897 - protein, 59 aa, Thermosynechococcus elongatus
ASVVPQEGQQVTRKHYPNYKVIVLNDDFNTIQHDVACLKKYIPNMISDRAWELTNQVHY

SEQ ID NO: 6898 - protein, 95 aa, Thermosynechococcus elongatus; identical to SEQ ID NO: 497

SEQ ID NO: 6899 - protein, 59 aa, Thermosynechococcus elongatus
ASVVPQEGQQVTRKHYPNYKVIVLNDDFNTIQHVLASLKKYIPNMISDRAWELTNQVHF

SEQ ID NO: 6900 - protein, 95 aa, Thermosynechococcus elongatus
ASVVPQEGQQVTRKHYPNYKVIVLNDDFNTIQHVVACLKKYIPNMISDRAWELTNQVHYGGRAIVWVGPQGQAELYHEQLLRAGLTMAPLEPEGS

SEQ ID NO: 6901 - protein, 95 aa, Thermosynechococcus elongatus
ASVVPQEGQQVTRKHYPNYKVIVLNDDFNTIQHVVACLKKYIPNMISDRAWELTNQVHYEGQAIVWVGPQEQAELYHEQLLRAGLTMAPLEPEGS

SEQ ID NO: 6902 - protein, 95 aa, Thermosynechococcus elongatus; identical to SEQ ID NO: 497

SEQ ID NO: 6903 - protein, 95 aa, Thermosynechococcus elongatus
ASVVPQEGQQVTRKHYPNYKVIVLNDDFNTIQHVVACLKKYIPNMISDRAWELTNQVHFGGRAIVWVGPQEQAELYHAQLLRAGLTMAPLEPEGS

SEQ ID NO: 6904 - protein, 95 aa, Thermosynechococcus elongatus
ASVVPQEGQQVTRKHYPNYKVIVLNDDFNTIQHVVACLKKYIPNMISDRAWELTNQVHFGGRAIVWVGPQELAELYHEQLLRAGLTMAPLEPEGS

SEQ ID NO: 6905 - protein, 95 aa, Thermosynechococcus elongatus
ASVVPQEGQQVTRKHYPNYKVIVLNDDFNTIQHVVACLKKYIPNMISDRAWELTNHVLYGGRAIVWVGPQEQAELYLEQLLRAGLSMAQLEPEGS

SEQ ID NO: 6906 - protein, 95 aa, Thermosynechococcus elongatus
ASVVPQEGQQVTRKHYPNYKVIVLNDDFNTIQHVVACLKKYIPNMISDRAWDLTNQVLYGGRAIVWVGPQEQAELYHEQLLRAGLTMAPLEPEGS

SEQ ID NO: 6907 - protein, 95 aa, Thermosynechococcus elongatus
ASVVPQEGQQVTRKHYPNYKVIVLNDDFNTIRHVAACLMKYIPNKTSDRAWELTNQVHYEGQAIVLVGPQEQAELYHELLLRAGLTMAPLEPVGS

SEQ ID NO: 6908 - protein, 95 aa, Thermosynechococcus elongatus
ASVVPQEGQQVTRKHYPNYKVIVLNDDFNTIRHVAACLMKYIPNMTSDRAWELTNQVHYKGQAIVWVGPQEQAELNHEQLLRAGLTMAPLEPEGS

SEQ ID NO: 6909 - protein, 77 aa, Thermosynechococcus elongatus
ASVVPQEGQQVTRKHYPNYKVIVLNDDFNTIRHVAACLMKYIPNMTSDRAWELTNQVHFKGLAIVWVGPQVQAELFH

SEQ ID NO: 6910 - protein, 95 aa, Thermosynechococcus elongatus
ASVVPQEGQQVTRKHYPNYKVIVLNDDFNTIRHFAECLMKYIPNKTSDRAWELTKQFHYEGQAIVWVGPQVQADLYHEQLLRAGLTMAPLDREGS

SEQ ID NO: 6911 - protein, 95 aa, Thermosynechococcus elongatus
ASVVPQEGQQVTRKHYPNYKVIVLNDDFNTLQHVVACLKKYIPNMISDRAWELTNQVHYKGQAIVWVGPQEQAELNHEQLLRAGLTMAPLEPEGS

SEQ ID NO: 6912 - protein, 95 aa, Thermosynechococcus elongatus
ASVVPQEGQQVTRKHYPNYKVIVLNDDFNTLQHVVACLKKYIPNMISDRAWELTNQVHYGGRAIVWVGPQVQAELYHEQLLRAGLTMAPLEPGGS

SEQ ID NO: 6913 - protein, 95 aa, Thermosynechococcus elongatus
ASVVPQEGQQVTRKHYPNYKVIVLNDDFNTVQHGVACLKKYIPNMISDRAWELTNQVHYGGRAIVWVGPQEQAELYHEQLLRAGLTMAPLEPEGS

SEQ ID NO: 6914 - protein, 95 aa, Thermosynechococcus elongatus
ASVVPQEGQQVTRKHYPNYKVIVLNDDFNTVQHVVACMQKYIPNMISDRAWELTNQVHYGGRAIVWVGPQAQAELYHEQLLRAGLTMAPLEPEGS

SEQ ID NO: 6915 - protein, 95 aa, Thermosynechococcus elongatus
ASVVPQEGQQVTRKHYPNYKVIVLNDDFNTVQHVVACLKKYIPNMISDRAWELTNQVHDGGRAIVWVGPQEQAELYHEQLLRAGLTMAPLEPEGS

SEQ ID NO: 6916 - protein, 95 aa, Thermosynechococcus elongatus
ASVVPQEGQQVTRKHYPNYKVIVLNDDFNTVRHVAACLMKYIPNMTSDRAWELTNQVHYEGQAIVWVGPQEQAELYHEQLLRAGLTMAPLEPEGS

SEQ ID NO: 6917 - protein, 95 aa, Thermosynechococcus elongatus
ASVVPQEGQQVTRKHYPNYKVIVLNDDFNTVRHVAACLMKYLPNMTSDRAWELTNQVHYEGQAIVWVGPQEQAELYHEQLLRAGLTMAPLEPEGS

SEQ ID NO: 6918 - protein, 95 aa, Thermosynechococcus elongatus
ASVVPQEGQQVTRKHYPNYKVIVLNDDFNTYQHDVACLKKYIPNMISDRAWELTNQVHYGGRAIVWVGPQEQAELYHEQLLRAGLTMAPLEPEGS

SEQ ID NO: 6919 - protein, 95 aa, Thermosynechococcus elongatus
ASVVPQEGQQVTRKHYPNYKVIVLNDDFNTYQHGVACLKKYIPNMISDRAWELTNQVHYGGRAIVWVGPQEQAELYHEQLLRAGLTMAPLEPEGS

SEQ ID NO: 6920 - protein, 95 aa, Thermosynechococcus elongatus
ASVVPQEGQQVTRKHYPNYKVIVLNDDFNTYQHVVACLKKNIPNMISDRAWELTNQVHYGGRAIVWVGPQEQAELYHEQLLRAGLTMAPLEPEGS

SEQ ID NO: 6921 - protein, 95 aa, Thermosynechococcus elongatus
ASVVPQEGQQVTRKHYPNYKVIVLNDDFNTYQHVVACLKKYIPNMISDRAWELTNQVHYGGRAIVWVGPQEQAELYHEQLLRAGLTMAPLEPEGS

SEQ ID NO: 6922 - protein, 95 aa, Thermosynechococcus elongatus; identical to SEQ ID NO: 6921

SEQ ID NO: 6923 - protein, 59 aa, Thermosynechococcus elongatus
ASVVPQEGQQVTRKHYPNYKVIVLNDDFNTYQHVVACLKKYIPNMISDRAWELTNQVHY

SEQ ID NO: 6924 - protein, 95 aa, Thermosynechococcus elongatus
ASVVPQEGQQVTRKHYPNYKVIVLNDDFNTYQHVVACLKKYIPNMISDRAWELTNQVLYGGRAIVWVGPQEQAELYHEQLLRAGLTLAPVEPEGS

SEQ ID NO: 6925 - protein, 40 aa, Thermosynechococcus elongatus
ASVVPQEGQQVTRKHYPNYKVIVLNDDFNTYQHVVACLKK

SEQ ID NO: 6926 - protein, 77 aa, Thermosynechococcus elongatus
ASVVPQEGQQVTRKHYPNYKVIVLNDDFNTYRHVAACLMKYIPNMTSDRAWELTNQVHYEGQAIVWVCTQVQAELYH

SEQ ID NO: 6927 - protein, 95 aa, Thermosynechococcus elongatus
ASVVPQEGQQVTRKHYPNYKVIVLNDDFNTYRHVAACLMKYIPNMTSDRAWELTNQVHYEGQAIVWVGPQVQAELYHEQLLRAGLTMAPLEPGGS

SEQ ID NO: 6928 - protein, 95 aa, Thermosynechococcus elongatus
ASVVPQEGQQVTRKHYPNYKVIVLNDDFNTYRHVAACLMKYIPNMTSDRAWELTNQVHYEGLAIVWVGPHDQAELYLEQLLRAGLTRAPLEPEGS

SEQ ID NO: 6929 - protein, 95 aa, Thermosynechococcus elongatus
ASVVPQEGQQVTRKHYPNYKVIVLNDDFNTSQHVVACLKKYIPNMISDRAWELTNQVHYGGRAIVWVGPQEQAELYHEQLLRAGLTMAPLEPEGS

SEQ ID NO: 6930 - protein, 95 aa, Thermosynechococcus elongatus
ASVVPQEGQQVTRKHYPNYKVIVLNDDFNTSQHVVACLKKYIPNMISDRAWELTNQVHYGGRAIVWVGPQVQAELYHEQLLRAGLTMAPLEPGGS

SEQ ID NO: 6931 - protein, 95 aa, Thermosynechococcus elongatus
ASVVPQEGQQVTRKHYPNYKVIVLNDDFNTLQHVAACLMKYIPNKTSDRAWELTNQVHYEGQAIVWVGPQEQAELYHEQLLRAGLTMAPLEPEGS

SEQ ID NO: 6932 - protein, 36 aa, Thermosynechococcus elongatus
ASVVPQEGQQVTRKHYPNYKVIVLNDDFNTLQHVVA

SEQ ID NO: 6933 - protein, 95 aa, Thermosynechococcus elongatus
ASVVPQEGQQVTRKHYPNYKVIVLNDDFNTLQHVVACLKKYIPNMISDRAWELTNQVHYGGRAIVWVGPQEQAELYHEQLLRAGLTMAPLEPGGS

SEQ ID NO: 6934 - protein, 95 aa, Thermosynechococcus elongatus
ASVVPQEGQQVTRKHYPNYKVIVLNDDFNTLQHVVACLKKYIPNIISDRAWELTNKVHYGGRAIDWVGPQEQAELYHEQLLRAGLTMAPLEPEGS

SEQ ID NO: 6935 - protein, 95 aa, Thermosynechococcus elongatus
ASVVPQEGQQVTRKHYPNYKVIVLNDDFNTLRHVAACLMKYIPNMTSDRAWELTNQVHYEGQDIVWVGPQSQAELYHEQLLRAGLTMAPLEPEGS

SEQ ID NO: 6936 - protein, 95 aa, Thermosynechococcus elongatus
ASVVPQEGQQVTRKHYPNYKVIVLNDDFNTFKHVVECLKKYIPNMISDRAWELTNQVHYGGQAIVWVGPQEQAELYHEQLLRAGLTMAPLEPEGS

SEQ ID NO: 6937 - protein, 95 aa, Thermosynechococcus elongatus
ASVVPQEGQQVTRKHYPNYKVIVLNDDFNTFKHVVECLKKYIPNMISDRAWELTNQVHYGGRAIVWVGPQEQAELYHEQLLRAGLTMAPLEPEGS

SEQ ID NO: 6938 - protein, 36 aa, Thermosynechococcus elongatus
ASVVPQEGQQVTRKHYPNYKVIVLNDDFNTFKHVVA

SEQ ID NO: 6939 - protein, 37 aa, Thermosynechococcus elongatus
ASVVPQEGQQVTRKHYPNYKVIVLNDDFNTFKHVVAC

SEQ ID NO: 6940 - protein, 95 aa, Thermosynechococcus elongatus
ASVVPQEGQQVTRKHYPNYKVIVLNDDFNTFKHVVACLKKYIPNMISDRDWELTNQVHYEGQAIVWVGPQEQAELYHEQLLRAGLTMAPLEPEGS

SEQ ID NO: 6941 - protein, 59 aa, Thermosynechococcus elongatus
ASVVPQEGQQVTRKHYPNYKVIVLNDDFNTFKHVVACLKKYIPNMISDRAWELTNKVHY

SEQ ID NO: 6942 - protein, 95 aa, Thermosynechococcus elongatus
ASVVPQEGQQVTRKHYPNYKVIVLNDDFNTFKHVVACLKKYIPNMISDRAWELTNQVHYGGRAIVWVGPQEQAELYHKQLLRAGLTMAPLEPEGS

SEQ ID NO: 6943 - protein, 95 aa, Thermosynechococcus elongatus
ASVVPQEGQQVTRKHYPNYKVIVLNDDFNTFKHVVACLKKYIPNMISDRAWELTNQVHYGGRAIVWVGPQEQAELYHEQLLRAGLTMAPLEPGGS

SEQ ID NO: 6944 - protein, 70 aa, Thermosynechococcus elongatus
ASVVPQEGQQVTRKHYPNYKVIVLNDDFNTFKHVVACLKKYIPNMISDRAWELTNQVHYGGRAIVWVGPQ

SEQ ID NO: 6945 - protein, 95 aa, Thermosynechococcus elongatus
ASVVPQEGQQVTRKHYPNYKVIVLNDDFNTFKHVVACLKKYIPNMISDRAWELTNQVHYGGRAIVWVVPQEQAELYHEQLLRAGLTMAPLEPEGS

SEQ ID NO: 6946 - protein, 95 aa, Thermosynechococcus elongatus
ASVVPQEGQQVTRKHYPNYKVIVLNDDFNTFKHVVACLKKYIPNMISDRAWELTNQVHYGGRAIVWVCPQEQAELYHEQLLRAGLTIAPLEPEGS

SEQ ID NO: 6947 - protein, 95 aa, Thermosynechococcus elongatus
ASVVPQEGQQVTRKHYPNYKVIVLNDDFNTFKHVVACLKKYIPNMISDRAWELTNHVHYGGRAIVWVGPQDQAELYHEQLLRAGLTMAPLEPEGS

SEQ ID NO: 6948 - protein, 95 aa, Thermosynechococcus elongatus
ASVVPQEGQQVTRKHYPNYKVIVLNDDFNTFKHVVACLKKYIPNMISDRACELTNQVHYGGRAIVWVGPQEQAELYHEQLLRAGLTMAPLEPEGS

SEQ ID NO: 6949 - protein, 95 aa, Thermosynechococcus elongatus
ASVVPQEGQQVTRKHYPNYKVIVLNDDFNTFKHVVACLKKYIPNMISDRSWELTNQVHYGGRAIVWVGPQEQAELYHEQLLRAGLTMAPLEPGGS

SEQ ID NO: 6950 - protein, 95 aa, Thermosynechococcus elongatus
ASVVPQEGQQVTRKHYPNYKVIVLNDDFNTFKHFVACLKKYIPNMISDRAWELTNQVHYGGRAIVWVGPQEQAELYHEQLLRAGLTMAPLEPEGS

SEQ ID NO: 6951 - protein, 59 aa, Thermosynechococcus elongatus
ASVVPQEGQQVTRKHYPNYKVIVLNDDFNTFKHFVACLKKYIPNMISDRACELTNKVHK

SEQ ID NO: 6952 - protein, 95 aa, Thermosynechococcus elongatus; identical to SEQ ID NO: 11

SEQ ID NO: 6953 - protein, 95 aa, Thermosynechococcus elongatus; identical to SEQ ID NO: 20

SEQ ID NO: 6954 - protein, 37 aa, Thermosynechococcus elongatus
ASVVPQEGQQVTRKHYPNYKVIVLNDDFNTFQQLLHA

SEQ ID NO: 6955 - protein, 95 aa, Thermosynechococcus elongatus
ASVVPQEGQQVTRKHYPNYKVIVLNDDFNTFQHIVACLKKYIPNMISDRAWELTNQVHYGGRAIVWVGPQEQAELYHEQLLRAGLTMATLEPEGS

SEQ ID NO: 6956 - protein, 95 aa, Thermosynechococcus elongatus
ASVVPQEGQQVTRKHYPNYKVIVLNDDFNTFQHIVACLKKYIPNMISDRAWELTNQVHYGGRAIVWVGPQEQAELYHEQLLRAGLTMAPLEPEGS

SEQ ID NO: 6957 - protein, 95 aa, Thermosynechococcus elongatus; identical to SEQ ID NO: 6956

SEQ ID NO: 6958 - protein, 95 aa, Thermosynechococcus elongatus
ASVVPQEGQQVTRKHYPNYKVIVLNDDFNTFQHLVACLKKYIPNMISDRAWELTNQVHYGGRAIVWVGPQEQAELYHEQLLRAGLTMAPLEPEGS

SEQ ID NO: 6959 - protein, 36 aa, Thermosynechococcus elongatus
ASVVPQEGQQVTRKHYPNYKVIVLNDDFNTFQHDVA

SEQ ID NO: 6960 - protein, 36 aa, Thermosynechococcus elongatus; identical to SEQ ID NO: 6959

SEQ ID NO: 6961 - protein, 37 aa, Thermosynechococcus elongatus
ASVVPQEGQQVTRKHYPNYKVIVLNDDFNTFQHDVAC

SEQ ID NO: 6962 - protein, 95 aa, Thermosynechococcus elongatus
ASVVPQEGQQVTRKHYPNYKVIVLNDDFNTFQHDVACLKKYIPNMISDRACELTNQLHFGGRAIVWVGPQEQAELYHELLLRAGLTMAPLEPEGS

SEQ ID NO: 6963 - protein, 95 aa, Thermosynechococcus elongatus; identical to SEQ ID NO: 190

SEQ ID NO: 6964 - protein, 95 aa, Thermosynechococcus elongatus
ASVVPQEGQQVTRKHYPNYKVIVLNDDFNTFQHDVACLKKYIPNMISDRAWELTNQVHYECQAIVFVCPQEQAELYHEQLLRAGLSIAPLVPEGS

SEQ ID NO: 6965 - protein, 95 aa, Thermosynechococcus elongatus
ASVVPQEGQQVTRKHYPNYKVIVLNDDFNTFQHDVACLKKYIPNMISDRAWELTNQVHYGGRAIVWVGPQEQAELNHEQLLRAGLTMAPLEPEGS

SEQ ID NO: 6966 - protein, 95 aa, Thermosynechococcus elongatus
ASVVPQEGQQVTRKHYPNYKVIVLNDDFNTFQHDVACLKKYIPNMISDRAWELTNQVHYGGRAIVWVGPQEQAELYHVQLLRAGLTIAPLEPEGS

SEQ ID NO: 6967 - protein, 59 aa, Thermosynechococcus elongatus
ASVVPQEGQQVTRKHYPNYKVIVLNDDFNTFQHDVACLKKYIPNMISDRAWELTNQVHY

SEQ ID NO: 6968 - protein, 95 aa, Thermosynechococcus elongatus
ASVVPQEGQQVTRKHYPNYKVIVLNDDFNTFQHDVACLKKYIPNMISDRAWELTNQVHFGGRAIVWVGPQEQAELYHEQLLRAGLTMAPLDPEGS

SEQ ID NO: 6969 - protein, 95 aa, Thermosynechococcus elongatus
ASVVPQEGQQVTRKHYPNYKVIVLNDDFNTFQHDVACLKKYIPNMISDRAWELTNQVLYGGRAIVWVGPQEQAVLYLEQLLRAGLTMATLVPEGS

SEQ ID NO: 6970 - protein, 74 aa, Thermosynechococcus elongatus
ASVVPQEGQQVTRKHYPNYKVIVLNDDFNTFQHDVACLKKYIPNLISDRAWELTNHGHYRGRAIVWVGPQAQAE

SEQ ID NO: 6971 - protein, 95 aa, Thermosynechococcus elongatus
ASVVPQEGQQVTRKHYPNYKVIVLNDDFNTFQHDVACLKMYIPNMISDRAWELTNQVHFGGRAIVCVGPQELAELYHDQLLRAGLTMAPLEPEGS

SEQ ID NO: 6972 - protein, 95 aa, Thermosynechococcus elongatus
ASVVPQEGQQVTRKHYPNYKVIVLNDDFNTFQHAVACLKKYIPNMISDRAWELTNQVHYGGRAIVWVGPQEQAELYHEQLLRAGLTMAPLEPEGS

SEQ ID NO: 6973 - protein, 37 aa, Thermosynechococcus elongatus
ASVVPQEGQQVTRKHYPNYKVIVLNDDFNTFQHGVAC

SEQ ID NO: 6974 - protein, 95 aa, Thermosynechococcus elongatus
ASVVPQEGQQVTRKHYPNYKVIVLNDDFNTFQHGVACLKKYIPNMISDRAWELTNQGHYGGRAIVWVGPQEQAELYHEQLLRAGLTMAPLEPEGS

SEQ ID NO: 6975 - protein, 95 aa, Thermosynechococcus elongatus
ASVVPQEGQQVTRKHYPNYKVIVLNDDFNTFQHGVACLKKYIPNMISDRAWELTNQVHYGGRAIVWVGPQEQAELDHEQLLRAGLTRAPLEPEGS

SEQ ID NO: 6976 - protein, 95 aa, Thermosynechococcus elongatus
ASVVPQEGQQVTRKHYPNYKVIVLNDDFNTFQHGVACLKKYIPNMISDRAWELTNQVHYGGRAIVWVGPQAQAELYHEQLLRAGLTMAPLEPEGS

SEQ ID NO: 6977 - protein, 95 aa, Thermosynechococcus elongatus
ASVVPQEGQQVTRKHYPNYKVIVLNDDFNTFQHGVACLKKYIPNMISDRAWELTNPVHYGGRAIVWVGPQEQAELYHEQLLRAGLTMAPLEPEGS

SEQ ID NO: 6978 - protein, 95 aa, Thermosynechococcus elongatus
ASVVPQEGQQVTRKHYPNYKVIVLNDDFNTFQHGVAWLKKYIPNMISDRAWELTNQVLYEGQAIVWVGPQVQAELYLVQLLRAGLTMAPLEPGGS

SEQ ID NO: 6979 - protein, 95 aa, Thermosynechococcus elongatus
ASVVPQEGQQVTRKHYPNYKVIVLNDDFNTFQHGVACLKKYIPNMSSDRAWELTNQVHDGGRAIVGVGPQEQAELYHEHLLRAGLTMAPLEPEGS

SEQ ID NO: 6980 - protein, 95 aa, Thermosynechococcus elongatus
ASVVPQEGQQVTRKHYPNYKVIVLNDDFNTFQHVDACLKKYIPNMISDRAWELTNQGHYGGRAIVWVGPQEQAELYHEQLLRAGLTMAPLEPEGS

SEQ ID NO: 6981 - protein, 95 aa, Thermosynechococcus elongatus; identical to SEQ ID NO: 240

SEQ ID NO: 6982 - protein, 95 aa, Thermosynechococcus elongatus
ASVVPQEGQQVTRKHYPNYKVIVLNDDFNTFQHVVACLKKYIPNMISDRAWELTNQVHYGGRAIVWVGTQELAVLYHELLLRAGLTMAPLEPEGS

SEQ ID NO: 6983 - protein, 95 aa, Thermosynechococcus elongatus; identical to SEQ ID NO: 1

SEQ ID NO: 6984 - protein, 95 aa, Thermosynechococcus elongatus
ASVVPQEGQQVTRKHYPNYKVIVLNDDFNTFQHVVACLKKYIPNMISDRAWELTNQVHYGGRAIVWVGPLEQAELYHEQLLRAGLTMAPLEPEGS

SEQ ID NO: 6985 - protein, 95 aa, Thermosynechococcus elongatus
ASVVPQEGQQVTRKHYPNYKVIVLNDDFNTFQHVVACLKKYIPNMISDRAWELTNQVHYGGRALVWVGPQEQAELYHEQWLRAGLTMAPLEPEGS

SEQ ID NO: 6986 - protein, 95 aa, Thermosynechococcus elongatus; identical to SEQ ID NO: 1118

SEQ ID NO: 6987 - protein, 37 aa, Thermosynechococcus elongatus
ASVVPQEGQQVTRKHYPNYKVIVLNDDFNTFQHVVHA

SEQ ID NO: 6988 - protein, 95 aa, Thermosynechococcus elongatus
ASVVPQEGQQVTRKHYPNYKVIVLNDDFNTFQHVDACLKKYIPNMNSDRAWELTNQVHYEGLAIVWVGPQVQAELYHEQLLRAGLTMAPLEPGGS

SEQ ID NO: 6989 - protein, 95 aa, Thermosynechococcus elongatus
ASVVPQEGQQVTRKHYPNYKVIVLNDDFNTFQHVDACLKKYIPNMSSDRAWELTNQVHYLGLAIVWVGPQEQAELNHEQLLRAGLTMAPLEPEGS

SEQ ID NO: 6990 - protein, 95 aa, Thermosynechococcus elongatus
ASVVPQEGQQVTRKHYPNYKVIVLNDDFNTFQHVDACLKKYIPNMISDRAWELTNQVHYKGQAIVWVGPQEQAELNHEQLLRAGLTMAPLEPEGS

SEQ ID NO: 6991 - protein, 95 aa, Thermosynechococcus elongatus
ASVVPQEGQQVTRKHYPNYKVIVLNDDFNTFQHVDACLKKYIPNMISDRAWELTNQVHYGGRAIVWVGPQEQAELYHEQLLRAGLTMAPLEPGGS

SEQ ID NO: 6992 - protein, 95 aa, Thermosynechococcus elongatus
ASVVPQEGQQVTRKHYPNYKVIVLNDDFNTFQHVDACLMKYIPNMNSDRAWELTNQVHYEGKAIVWVGPQEQAELYHEQLLRAGLTMAPLEPEGS

SEQ ID NO: 6993 - protein, 95 aa, Thermosynechococcus elongatus
ASVVPQEGQQVTRKHYPNYKVIVLNDDFNTFQHVDACLMKYIPNMTSDRAWELTNQVHYEGLAIVWVGPQEQAELYHEQLLRAGLTMAPLEPEGS

SEQ ID NO: 6994 - protein, 95 aa, Thermosynechococcus elongatus
ASVVPQEGQQVTRKHYPNYKVIVLNDDFNTFQHVAACLMKYIPNMTSDRAWELTIQVHYEGQAIVWVGPQEQAELYHEQLLRAGLTMAPLEPEGS

SEQ ID NO: 6995 - protein, 95 aa, Thermosynechococcus elongatus
ASVVPQEGQQVTRKHYPNYKVIVLNDDFNTFQHVAACLKKYIPNMISDRAWELTNQVHYGGRAIVWVGTQEQAELYHEQLLRAGLTMAPLEPEGS

SEQ ID NO: 6996 - protein, 95 aa, Thermosynechococcus elongatus; identical to SEQ ID NO: 122

SEQ ID NO: 6997 - protein, 95 aa, Thermosynechococcus elongatus; identical to SEQ ID NO: 122

SEQ ID NO: 6998 - protein, 95 aa, Thermosynechococcus elongatus
ASVVPQEGQQVTRKHYPNYKVIVLNDDFNTFQHVAACLMKYIPNKTSDRAWELTNQVHYEGQAIVWVGPQEQAELYHEQLLRAGLTMAPLEPGGS

SEQ ID NO: 6999 - protein, 95 aa, Thermosynechococcus elongatus
ASVVPQEGQQVTRKHYPNYKVIVLNDDFNTFQHVAACLMKYIPNKTSDRAWELTNQVHYEGQAIVWVCPQEQAELYHEQLLRAGLTMAPLEPEGS

SEQ ID NO: 7000 - protein, 95 aa, Thermosynechococcus elongatus
ASVVPQEGQQVTRKHYPNYKVIVLNDDFNTFQHVAACLMKYIPNKTSDRAWELTNQVHYGGRAIVWVGPQEQAELYHEQLLRAGLTMAPLEPEGS

SEQ ID NO: 7001 - protein, 95 aa, Thermosynechococcus elongatus; identical to SEQ ID NO: 7000

SEQ ID NO: 7002 - protein, 95 aa, Thermosynechococcus elongatus
ASVVPQEGQQVTRKHYPNYKVIVLNDDFNTFQHVAACLMKYIPNKTSDRAWELTNQVHYVGQAIVWVGPQEQAELYHEQLLRAGLTMAPLEPEGS

SEQ ID NO: 7003 - protein, 95 aa, Thermosynechococcus elongatus; identical to SEQ ID NO: 7002

SEQ ID NO: 7004 - protein, 95 aa, Thermosynechococcus elongatus
ASVVPQEGQQVTRKHYPNYKVIVLNDDFNTFQHVAACLMKYIPNKTSDRAWELTNQVHYVGQAIVWVGPQERAELYHEQLLRAGLTMAPLEPEGS

SEQ ID NO: 7005 - protein, 95 aa, Thermosynechococcus elongatus; identical to SEQ ID NO: 7004

SEQ ID NO: 7006 - protein, 77 aa, Thermosynechococcus elongatus
ASVVPQEGQQVTRKHYPNYKVIVLNDDFNTFQHVAACLMKYIPNKTSDRAWELTNQVHYVGRAIVWVGPQEQAELYH

SEQ ID NO: 7007 - protein, 95 aa, Thermosynechococcus elongatus; identical to SEQ ID NO: 75

SEQ ID NO: 7008 - protein, 95 aa, Thermosynechococcus elongatus
ASVVPQEGQQVTRKHYPNYKVIVLNDDFNTFQHVAACLMKYIPNMTSDRAWELTNKVHYEGQAIVWVGPQEQAELYHEQLLRAGLTMAPLEPEGS

SEQ ID NO: 7009 - protein, 95 aa, Thermosynechococcus elongatus; identical to SEQ ID NO: 75

SEQ ID NO: 7010 - protein, 95 aa, Thermosynechococcus elongatus
ASVVPQEGQQVTRKHYPNYKVIVLNDDFNTFQHVAACLMKYIPNMTSDRAWELTNQVHYEGQAIVRVGPQEQAELYHKQLLRAGLTMAPLEPGGS

SEQ ID NO: 7011 - protein, 95 aa, Thermosynechococcus elongatus
ASVVPQEGQQVTRKHYPNYKVIVLNDDFNTFQHVAACLMKYIPNMTSDRAWELTNQVHYEGQAIVRVGPQEQAELYHKQLLRAGLTMAPFEPEGS

SEQ ID NO: 7012 - protein, 95 aa, Thermosynechococcus elongatus
ASVVPQEGQQVTRKHYPNYKVIVLNDDFNTFQHVAACLMKYIPNMTSDRAWELTNQVHYEGQAIVWDGPQVQAELYHEQLLRAGLTMAPLEPGGS

SEQ ID NO: 7013 - protein, 95 aa, Thermosynechococcus elongatus
ASVVPQEGQQVTRKHYPNYKVIVLNDDFNTFQHVAACLMKYIPNMTSDRAWELTNQVHYEGQAIVWVGPQEQAELNHEQLLRAGLTMAPLEPEGS

SEQ ID NO: 7014 - protein, 95 aa, Thermosynechococcus elongatus
ASVVPQEGQQVTRKHYPNYKVIVLNDDFNTFQHVAACLMKYIPNMTSDRAWELTNQVHYEGQAIVWVGPQEQAELYHEQLLRTGLTMAPLEPEGS

SEQ ID NO: 7015 - protein, 95 aa, Thermosynechococcus elongatus
ASVVPQEGQQVTRKHYPNYKVIVLNDDFNTFQHVAACLMKYIPNMTSDRAWELTNQVHYEGQAIVWVGPQEQAELYHEQLLRAGLTMAPSEPEGS

SEQ ID NO: 7016 - protein, 95 aa, Thermosynechococcus elongatus
ASVVPQEGQQVTRKHYPNYKVIVLNDDFNTFQHVAACLMKYIPNMTSDRAWELTNQVHYEGQAIVWVGPQAQAELYHEQLLRAGLTMAPLEPEGS

SEQ ID NO: 7017 - protein, 95 aa, Thermosynechococcus elongatus
ASVVPQEGQQVTRKHYPNYKVIVLNDDFNTFQHVAACLMKYIPNMTSDRAWELTNQVHYEGQAIVWVGPQGQAELYHEQLLRAGLTMAPLEPGGS

SEQ ID NO: 7018 - protein, 73 aa, Thermosynechococcus elongatus
ASVVPQEGQQVTRKHYPNYKVIVLNDDFNTFQHVAACLMKYIPNMTSDRAWELTNQVHYEGQAIVWVGPQVQA

SEQ ID NO: 7019 - protein, 95 aa, Thermosynechococcus elongatus
ASVVPQEGQQVTRKHYPNYKVIVLNDDFNTFQHVAACLMKYIPNMTSDRAWELTNQVHYEGQAIVWVGPQVLAELYLELLLSAGLTMAPLEPGGS

SEQ ID NO: 7020 - protein, 95 aa, Thermosynechococcus elongatus
ASVVPQEGQQVTRKHYPNYKVIVLNDDFNTFQHVAACLMKYIPNMTSDRAWELTNQVHYEGQAIFWVGPQEQAELYHEQLLRAGLTMAPLEPEGS

SEQ ID NO: 7021 - protein, 95 aa, Thermosynechococcus elongatus
ASVVPQEGQQVTRKHYPNYKVIVLNDDFNTFQHVAACLMKYIPNMTSDRAWELTNQVHYEGQALVWVGPQVQAELYHEQLLRAGLTMAPLEPGGS

SEQ ID NO: 7022 - protein, 95 aa, Thermosynechococcus elongatus
ASVVPQEGQQVTRKHYPNYKVIVLNDDFNTFQHVAACLMKYIPNMTSDRAWELTNQVHYEGRAIVWVGPQEQAELYHEQLLRAGLTMAPLEPEGS

SEQ ID NO: 7023 - protein, 95 aa, Thermosynechococcus elongatus
ASVVPQEGQQVTRKHYPNYKVIVLNDDFNTFQHVAACLMKYIPNMTSDRAWELTNQVHYGGQAIVWVGPQEQAVLYHEQLLRAGLTMAPLEPEGS

SEQ ID NO: 7024 - protein, 95 aa, Thermosynechococcus elongatus
ASVVPQEGQQVTRKHYPNYKVIVLNDDFNTFQHVAACLMKYIPNMTSDRAWELTNQVHYGGRAIVWVGPQEQAELYHEQFLRAGLTMAPLEPEGS

SEQ ID NO: 7025 - protein, 95 aa, Thermosynechococcus elongatus
ASVVPQEGQQVTRKHYPNYKVIVLNDDFNTFQHVAACLMKYIPNMTSDRAWELTNQVHYVGQAIVWVGPQVQAELYHEQLLRAGLTMAPLEPGGS

SEQ ID NO: 7026 - protein, 95 aa, Thermosynechococcus elongatus
ASVVPQEGQQVTRKHYPNYKVIVLNDDFNTFQHVAACLMKYIPNMTSDRAWELTNQVHYKGQATVWVGPQEQAELYHEQLLRAGLTMAPLEPEGS

SEQ ID NO: 7027 - protein, 95 aa, Thermosynechococcus elongatus
ASVVPQEGQQVTRKHYPNYKVIVLNDDFNTFQHVAACLMKYIPNMTSDRAWEFTNQVHYEGQAIVWVGPQEQAELYHEQLLRAGLTMAPLEPEGS

SEQ ID NO: 7028 - protein, 95 aa, Thermosynechococcus elongatus
ASVVPQEGQQVTRKHYPNYKVIVLNDDFNTFQHVAACLMKYIPNMTSDRAWELTNQVHYKGQAILWVGPQEQAELNHEQLLRAGLTMAPLEPEGS

SEQ ID NO: 7029 - protein, 95 aa, Thermosynechococcus elongatus
ASVVPQEGQQVTRKHYPNYKVIVLNDDFNTFQHVAACLMKYIPNMTSDRAWELTNQVHYKGQSIVWVGPQEQAELNHEQLLRAGLTIAPLEPEGS

SEQ ID NO: 7030 - protein, 95 aa, Thermosynechococcus elongatus
ASVVPQEGQQVTRKHYPNYKVIVLNDDFNTFQHVAACLMKYIPNMTSDRAWELTNQVHYKGRAIVWVGPQEQAELNHEQLLRAGLTMAPLEPEGS

SEQ ID NO: 7031 - protein, 95 aa, Thermosynechococcus elongatus; identical to SEQ ID NO: 75

SEQ ID NO: 7032 - protein, 95 aa, Thermosynechococcus elongatus; identical to SEQ ID NO: 606

SEQ ID NO: 7033 - protein, 95 aa, Thermosynechococcus elongatus; identical to SEQ ID NO: 6994

SEQ ID NO: 7034 - protein, 51 aa, Thermosynechococcus elongatus
ASVVPQEGQQVTRKHYPNYKVIVLNDDFNTFQHVAACLMKYIPNMTSDRAW

SEQ ID NO: 7035 - protein, 95 aa, Thermosynechococcus elongatus
ASVVPQEGQQVTRKHYPNYKVIVLNDDFNTFQHVAACLMKYILNMTSDRAWELTNQVHYEGQAIVWVGPQEQAELYHEQLLRAGLTMAPLEPEGS

SEQ ID NO: 7036 - protein, 95 aa, Thermosynechococcus elongatus; identical to SEQ ID NO: 142

SEQ ID NO: 7037 - protein, 95 aa, Thermosynechococcus elongatus
ASVVPQEGQQVTRKHYPNYKVIVLNDDFNTFQHVAACLMNYIPDMTSDRAWELTNQVHYKGQAIVWVGPQEQAELNHEQLLRAGLTMAPLEPEGS

SEQ ID NO: 7038 - protein, 95 aa, Thermosynechococcus elongatus
ASVVPQEGQQVTRKHYPNYKVIVLNDDFNTFQHVAAFLMKYIPNKTSDRAWELTNQVHYEGQAIVWVGPQEQAELYHEQLLRAGLTMAPLEPEGS

SEQ ID NO: 7039 - protein, 95 aa, Thermosynechococcus elongatus
ASVVPQEGQQVTRKHYPNYKVIVLNDDFNTFQHVAAFLMKYIPNMTSDRAWELTNQVHYEGQAIVWVGPQEQAELYHEQLLRAGLTMAPLEPEGS

SEQ ID NO: 7040 - protein, 95 aa, Thermosynechococcus elongatus
ASVVPQEGQQVTRKHYPNYKVIVLNDDFNTFQHVGACLKKYIPNMISDRAWELTNQVHYGGRAIVWVGPQEQAELYHEQLLRAGLTMAPLEPEGS

SEQ ID NO: 7041 - protein, 95 aa, Thermosynechococcus elongatus
ASVVPQEGQQVTRKHYPNYKVIVLNDDFNTFQHVGACLKKYIPNMISDRAWELTNQVHYGGRAIVWVGPQDQAELYPDQLWRAGLTMAPLEPEGS

SEQ ID NO: 7042 - protein, 51 aa, Thermosynechococcus elongatus; identical to SEQ ID NO: 1160

SEQ ID NO: 7043 - protein, 95 aa, Thermosynechococcus elongatus; identical to SEQ ID NO: 69

SEQ ID NO: 7044 - protein, 95 aa, Thermosynechococcus elongatus
ASVVPQEGQQVTRKHYPNYKVIVLNDDFNTFQHVVACLKKYIPNMISDRAWELTNQVHDGGRAIVWDGPQEQAELYHEQVLRAGLPMAPQEPEGS

SEQ ID NO: 7045 - protein, 95 aa, Thermosynechococcus elongatus; identical to SEQ ID NO: 363

SEQ ID NO: 7046 - protein, 95 aa, Thermosynechococcus elongatus
ASVVPQEGQQVTRKHYPNYKVIVLNDDFNTFQHVVTCLKKYIPNMISDRAWELTNQVHYEGQAIVWVGPQEQAELYHEQLLRAGLTMAPLEPEGS

SEQ ID NO: 7047 - protein, 95 aa, Thermosynechococcus elongatus; identical to SEQ ID NO: 363

SEQ ID NO: 7048 - protein, 95 aa, Thermosynechococcus elongatus
ASVVPQEGQQVTRKHYPNYKVIVLNDDFNTFQHVVPCLMKYIPNMTSDRAWELTNQVHYEGQAIVWVGPQEQAELYHEQLLRAGLTMAPLEPEGS

SEQ ID NO: 7049 - protein, 58 aa, Thermosynechococcus elongatus
ASVVPQEGQQVTRKHYPNYKVIVLNDDFNTFQHVVECLKKYIPNMISDRAWELTNQVH

SEQ ID NO: 7050 - protein, 95 aa, Thermosynechococcus elongatus
ASVVPQEGQQVTRKHYPNYKVIVLNDDFNTFQHVVECLKKYIPNMISDRACELTNQVHYGGRAIVWVGPQEQAELYHEQLLRAGLTMAPLEPEGS

SEQ ID NO: 7051 - protein, 95 aa, Thermosynechococcus elongatus; identical to SEQ ID NO: 608

SEQ ID NO: 7052 - protein, 95 aa, Thermosynechococcus elongatus
ASVVPQEGQQVTRKHYPNYKVIVLNDDFNTFQHVVASLMKYIPNMTSDRAWELTNQVHYEGQAIVWVGPREQAELYHEQLLRAGLTMAPLEPEGS

SEQ ID NO: 7053 - protein, 95 aa, Thermosynechococcus elongatus
ASVVPQEGQQVTRKHYPNYKVIVLNDDFNTFQHVVARLKKYIPNMISDRACELTNQVHYGGRAIVWVGPQEQAELYHEQLLRAGLTMAPLEPEGS

SEQ ID NO: 7054 - protein, 95 aa, Thermosynechococcus elongatus
ASVVPQEGQQVTRKHYPNYKVIVLNDDFNTFQHVVARLKKYIPNMISDRAWELTNQVHYGGRAIVWVGPQEQAELYHEQLLRAGLTMAPLEPEGS

SEQ ID NO: 7055 - protein, 95 aa, Thermosynechococcus elongatus
ASVVPQEGQQVTRKHYPNYKVIVLNDDFNTFQHVVAGLMKYIPNMTSDRAWELTNQVHYDGQAIVWVGPQVQAELYHEQLLRAGLTMAPLEPGGS

SEQ ID NO: 7056 - protein, 36 aa, Thermosynechococcus elongatus; identical to SEQ ID NO: 254

SEQ ID NO: 7057 - protein, 36 aa, Thermosynechococcus elongatus; identical to SEQ ID NO: 254

SEQ ID NO: 7058 - protein, 36 aa, Thermosynechococcus elongatus; identical to SEQ ID NO: 254

SEQ ID NO: 7059 - protein, 36 aa, Thermosynechococcus elongatus; identical to SEQ ID NO: 254

SEQ ID NO: 7060 - protein, 36 aa, Thermosynechococcus elongatus; identical to SEQ ID NO: 254

SEQ ID NO: 7061 - protein, 36 aa, Thermosynechococcus elongatus; identical to SEQ ID NO: 254

SEQ ID NO: 7062 - protein, 36 aa, Thermosynechococcus elongatus; identical to SEQ ID NO: 254

SEQ ID NO: 7063 - protein, 36 aa, Thermosynechococcus elongatus; identical to SEQ ID NO: 254

SEQ ID NO: 7064 - protein, 36 aa, Thermosynechococcus elongatus; identical to SEQ ID NO: 254

SEQ ID NO: 7065 - protein, 36 aa, Thermosynechococcus elongatus; identical to SEQ ID NO: 254

SEQ ID NO: 7066 - protein, 36 aa, Thermosynechococcus elongatus; identical to SEQ ID NO: 254

SEQ ID NO: 7067 - protein, 95 aa, Thermosynechococcus elongatus
ASVVPQEGQQVTRKHYPNYKVIVLNDDFNTFQHVVACMKKYIPNMISDRAWELTNQVHYGGRAIVWVGPQEQAELYHEQLLRAGLSLVPLEPEGS

SEQ ID NO: 7068 - protein, 95 aa, Thermosynechococcus elongatus
ASVVPQEGQQVTRKHYPNYKVIVLNDDFNTFQHVVACMKKYIPNMISDRAWELTNQVHYGGRAIVWVGPQEQAELYLEQLLRAGLTMAPLEPEGS

SEQ ID NO: 7069 - protein, 95 aa, Thermosynechococcus elongatus; identical to SEQ ID NO: 1147

SEQ ID NO: 7070 - protein, 95 aa, Thermosynechococcus elongatus; identical to SEQ ID NO: 92

SEQ ID NO: 7071 - protein, 95 aa, Thermosynechococcus elongatus
ASVVPQEGQQVTRKHYPNYKVIVLNDDFNTFQHVVACVKKYIPNMISDRAWELTNQVHYGGRAIVWVGPQEQAELYHEQLLRAGLTMAPLEPEGS

SEQ ID NO: 7072 - protein, 95 aa, Thermosynechococcus elongatus
ASVVPQEGQQVTRKHYPNYKVIVLNDDFNTFQHVVACVKKYIPNMISDRAWELTNQVHYGGRAIVWVGPQEQAELYHEQLLRAGLTMAPLEPGGS

SEQ ID NO: 7073 - protein, 37 aa, Thermosynechococcus elongatus; identical to SEQ ID NO: 609

SEQ ID NO: 7074 - protein, 37 aa, Thermosynechococcus elongatus; identical to SEQ ID NO: 609

SEQ ID NO: 7075 - protein, 95 aa, Thermosynechococcus elongatus
ASVVPQEGQQVTRKHYPNYKVIVLNDDFNTFQHVVACWKKYIPNMISDRAWELTNQVHYGGRAIVWVGPQEQAELYHEQLLRAGLTMAPLEPEGS

SEQ ID NO: 7076 - protein, 95 aa, Thermosynechococcus elongatus
ASVVPQEGQQVTRKHYPNYKVIVLNDDFNTFQHVVACWKKYIPNMISDRAWELTIQVHYGGRAIVWVGPQEQAELYHEQLLRAGLTMAPLEPEGS

SEQ ID NO: 7077 - protein, 38 aa, Thermosynechococcus elongatus; identical to SEQ ID NO: 1169

SEQ ID NO: 7078 - protein, 95 aa, Thermosynechococcus elongatus; identical to SEQ ID NO: 1

SEQ ID NO: 7079 - protein, 44 aa, Thermosynechococcus elongatus
ASVVPQEGQQVTRKHYPNYKVIVLNDDFNTFQHVVACLRSTSQT

SEQ ID NO: 7080 - protein, 95 aa, Thermosynechococcus elongatus; identical to SEQ ID NO: 1

SEQ ID NO: 7081 - protein, 95 aa, Thermosynechococcus elongatus
ASVVPQEGQQVTRKHYPNYKVIVLNDDFNTFQHVVACLKKNIPNMISDRAWELTNQVHYGGRAIVWVGPQEQAELYHEQLLRAGLTMAPLEPEGS

SEQ ID NO: 7082 - protein, 95 aa, Thermosynechococcus elongatus
ASVVPQEGQQVTRKHYPNYKVIVLNDDFNTFQHVVACLKKDIRNMISDRAWELTNQVHYGGRAIVWVGPQEQAELYHEQLLRAGLTMAPLEPEGS

SEQ ID NO: 7083 - protein, 40 aa, Thermosynechococcus elongatus; identical to SEQ ID NO: 1121

SEQ ID NO: 7084 - protein, 40 aa, Thermosynechococcus elongatus; identical to SEQ ID NO: 1121

SEQ ID NO: 7085 - protein, 40 aa, Thermosynechococcus elongatus; identical to SEQ ID NO: 1121

SEQ ID NO: 7086 - protein, 95 aa, Thermosynechococcus elongatus
ASVVPQEGQQVTRKHYPNYKVIVLNDDFNTFQHVVACLKKYNPNMISDRAWELTNQVHYGGRAIVWVGPQEQAELYHEQLLRAGLTMAPLEPEGS

SEQ ID NO: 7087 - protein, 95 aa, Thermosynechococcus elongatus
ASVVPQEGQQVTRKHYPNYKVIVLNDDFNTFQHVVACLKKYTPNMISDRAWELTNQVHYGGRAIVWVGPQEQAELYHEQLLRAGLTMAPLEPEGS

SEQ ID NO: 7088 - protein, 95 aa, Thermosynechococcus elongatus; identical to SEQ ID NO: 1

SEQ ID NO: 7089 - protein, 95 aa, Thermosynechococcus elongatus
ASVVPQEGQQVTRKHYPNYKVIVLNDDFNTFQHVVACLKKYITNMISDRDWELTNQVHYGGRAIVWVGPQEQAELYHEQLLRAGLTMAPLEPEGS

SEQ ID NO: 7090 - protein, 95 aa, Thermosynechococcus elongatus
ASVVPQEGQQVTRKHYPNYKVIVLNDDFNTFQHVVACLKKYITNMISDRAWELTNQVHYGARAIVWVGPQEQAELYHEQLLRAGLTMAPLETEGS

SEQ ID NO: 7091 - protein, 95 aa, Thermosynechococcus elongatus; identical to SEQ ID NO: 610

SEQ ID NO: 7092 - protein, 59 aa, Thermosynechococcus elongatus
ASVVPQEGQQVTRKHYPNYKVIVLNDDFNTFQHVVACLKKYITNMISDRAWELTNQVHY

SEQ ID NO: 7093 - protein, 95 aa, Thermosynechococcus elongatus
ASVVPQEGQQVTRKHYPNYKVIVLNDDFNTFQHVVACLKKYIQNKTSDRAWELTNQVHYEGQAIVWVGPQEQAELYHEQLLRAGLTMAPLEPEGS

SEQ ID NO: 7094 - protein, 95 aa, Thermosynechococcus elongatus
ASVVPQEGQQVTRKHYPNYKVIVLNDDFNTFQHVVACLKKYIQNMISDRDWELTNQVHYGGRAIVWVGPQEQAELYHEQLLRAGLTMAPLEPEGS

SEQ ID NO: 7095 - protein, 95 aa, Thermosynechococcus elongatus
ASVVPQEGQQVTRKHYPNYKVIVLNDDFNTFQHVVACLKKYIQNMISDRAWELTNQVHYEGQAIVWVGPQEQAELYHEQLLRAGLTMAPLEPGGS

SEQ ID NO: 7096 - protein, 95 aa, Thermosynechococcus elongatus
ASVVPQEGQQVTRKHYPNYKVIVLNDDFNTFQHVVACLKKYIQNMISDRAWELTNQVHYGGRAIVWVGPQEQAELYQEQLLRAGLTMAPLEPEGS

SEQ ID NO: 7097 - protein, 95 aa, Thermosynechococcus elongatus
ASVVPQEGQQVTRKHYPNYKVIVLNDDFNTFQHVVACLKKYIQNMISDRAWELTNQVHYGGRAIVWVGPQEQAELYQEPLLRAGLTMAPLEPEGS

SEQ ID NO: 7098 - protein, 95 aa, Thermosynechococcus elongatus
ASVVPQEGQQVTRKHYPNYKVIVLNDDFNTFQHVVACLKKYIPNKTSDRAWELTNQVHYEGQAIVWVGPQEQAELYHEQLLRAGLTMAPLEPKGS

SEQ ID NO: 7099 - protein, 95 aa, Thermosynechococcus elongatus
ASVVPQEGQQVTRKHYPNYKVIVLNDDFNTFQHVVACLKKYIPNKTSDRAWELTNQVHYEGQAIVWVGPQEQAELYHEQLLRAGLTMAPLEPGGS

SEQ ID NO: 7100 - protein, 95 aa, Thermosynechococcus elongatus; identical to SEQ ID NO: 94

SEQ ID NO: 7101 - protein, 95 aa, Thermosynechococcus elongatus
ASVVPQEGQQVTRKHYPNYKVIVLNDDFNTFQHVVACLKKYIPNKTSDRAWELTNQVHYEGQAIVWVGPQVQAELYHEQLLRAGLTMAPLEPEGS

SEQ ID NO: 7102 - protein, 95 aa, Thermosynechococcus elongatus
ASVVPQEGQQVTRKHYPNYKVIVLNDDFNTFQHVVACLKKYIPNKTSDRAWELTNQVHYEGQAIVWVGPQVQAELYHEQLLRAGLTMAPLEPGGS

SEQ ID NO: 7103 - protein, 95 aa, Thermosynechococcus elongatus
ASVVPQEGQQVTRKHYPNYKVIVLNDDFNTFQHVVACLKKYIPNKTSDRAWELTNQVHYGGRAIVWVGPQEQAELYHEQLLRAGLTMAPLEPEGS

SEQ ID NO: 7104 - protein, 95 aa, Thermosynechococcus elongatus
ASVVPQEGQQVTRKHYPNYKVIVLNDDFNTFQHVVACLKKYIPNKTSDRAWELTNQVHYVGQAIVWVGPQEQAELYHEQLLRAGLTMAPLEPEGS

SEQ ID NO: 7105 - protein, 95 aa, Thermosynechococcus elongatus
ASVVPQEGQQVTRKHYPNYKVIVLNDDFNTFQHVVACLKKYIPNKTSDRAWELTNQVRYEGQAIVWVGPQEQAELYHEQLLRAGLTMAPLEPEGS

SEQ ID NO: 7106 - protein, 95 aa, Thermosynechococcus elongatus
ASVVPQEGQQVTRKHYPNYKVIVLNDDFNTFQHVVACLKKYIPNKTSDRAWELTNQVLYEGQAIVWVGPQEQAELYHEQLLRAGLTMAPLEPEGS

SEQ ID NO: 7107 - protein, 95 aa, Thermosynechococcus elongatus
ASVVPQEGQQVTRKHYPNYKVIVLNDDFNTFQHVVACLKKYIPNRISDRAWELTNQVHYGGRAIVWVGPQEQAELYHEQLLRAGLTMAPLEPEGS

SEQ ID NO: 7108 - protein, 95 aa, Thermosynechococcus elongatus
ASVVPQEGQQVTRKHYPNYKVIVLNDDFNTFQHVVACLKKYIPNMNSDRAWELTNQVHYGGRAIVWVGPQEQAELYHEQLLRAGLTMAPLEPEGS

SEQ ID NO: 7109 - protein, 95 aa, Thermosynechococcus elongatus
ASVVPQEGQQVTRKHYPNYKVIVLNDDFNTFQHVVACLKKYIPNMNSDRAWDLTNQVHYGGRAIVWVGPQEQAELYHEQLMRAGLTMAPLEPEGS

SEQ ID NO: 7110 - protein, 95 aa, Thermosynechococcus elongatus; identical to SEQ ID NO: 50

SEQ ID NO: 7111 - protein, 95 aa, Thermosynechococcus elongatus
ASVVPQEGQQVTRKHYPNYKVIVLNDDFNTFQHVVACLKKYIPNMTSDRARELTNQVHYEGQAIVWVGPQEQAELYHEQLLRAGLTMAPLEPEGS

SEQ ID NO: 7112 - protein, 52 aa, Thermosynechococcus elongatus
ASVVPQEGQQVTRKHYPNYKVIVLNDDFNTFQHVVACLKKYIPNMTSDRAWE

SEQ ID NO: 7113 - protein, 58 aa, Thermosynechococcus elongatus
ASVVPQEGQQVTRKHYPNYKVIVLNDDFNTFQHVVACLKKYIPNMTSDRAWELTNQVH

SEQ ID NO: 7114 - protein, 95 aa, Thermosynechococcus elongatus; identical to SEQ ID NO: 99

SEQ ID NO: 7115 - protein, 95 aa, Thermosynechococcus elongatus
ASVVPQEGQQVTRKHYPNYKVIVLNDDFNTFQHVVACLKKYIPNMTSDRAWELTNQVHYKGQAIVWVGPQEQAELNHEQLLRAGLTMAPLEPGGS

SEQ ID NO: 7116 - protein, 95 aa, Thermosynechococcus elongatus
ASVVPQEGQQVTRKHYPNYKVIVLNDDFNTFQHVVACLKKYIPNMTSDRAWELTNQVHYKGQAIVWVGPQEQAELYHEQLLRAGLTMAPLEPEGS

SEQ ID NO: 7117 - protein, 95 aa, Thermosynechococcus elongatus
ASVVPQEGQQVTRKHYPNYKVIVLNDDFNTFQHVVACLKKYIPNMTSDRAWELTNQVHYEGQAIVWVGPQEQAELNHEQLLRAGLTMAPLEPEGS

SEQ ID NO: 7118 - protein, 95 aa, Thermosynechococcus elongatus; identical to SEQ ID NO: 50

SEQ ID NO: 7119 - protein, 95 aa, Thermosynechococcus elongatus
ASVVPQEGQQVTRKHYPNYKVIVLNDDFNTFQHVVACLKKYIPNMTSDRAWELTNQVHYEGQAIVWVGPQEQAELYNEQLLRAGLTMAPLEPEGS

SEQ ID NO: 7120 - protein, 95 aa, Thermosynechococcus elongatus
ASVVPQEGQQVTRKHYPNYKVIVLNDDFNTFQHVVACLKKYIPNMTSDRAWELTNQVHYEGQAIVWVGPQEQAELYHEQLMRAGLTMAPLEPEGS

SEQ ID NO: 7121 - protein, 94 aa, Thermosynechococcus elongatus
ASVVPQEGQQVTRKHYPNYKVIVLNDDFNTFQHVVACLKKYIPNMTSDRAWELTNQVHYEGQAIVWVGPQEQAELYHEQLLRAGLTMAPWNQKD

SEQ ID NO: 7122 - protein, 95 aa, Thermosynechococcus elongatus
ASVVPQEGQQVTRKHYPNYKVIVLNDDFNTFQHVVACLKKYIPNMTSDRAWELTNQVHYEGQAIVWVGPQEQAELYHEQLLRAGLTMAPFEPEGS

SEQ ID NO: 7123 - protein, 73 aa, Thermosynechococcus elongatus
ASVVPQEGQQVTRKHYPNYKVIVLNDDFNTFQHVVACLKKYIPNMTSDRAWELTNQVHYEGQAIVWVGPQEQA

SEQ ID NO: 7124 - protein, 95 aa, Thermosynechococcus elongatus
ASVVPQEGQQVTRKHYPNYKVIVLNDDFNTFQHVVACLKKYIPNMTSDRAWELTNQVHYEGQAIVWVGPQVQAELYHEQLLRAGLTMAPLEPKGS

SEQ ID NO: 7125 - protein, 95 aa, Thermosynechococcus elongatus
ASVVPQEGQQVTRKHYPNYKVIVLNDDFNTFQHVVACLKKYIPNMTSDRAWELTNQVHYEGQAIVWVGPQVQAELYHEQLFRAGLTMAPLEPGGS

SEQ ID NO: 7126 - protein, 95 aa, Thermosynechococcus elongatus
ASVVPQEGQQVTRKHYPNYKVIVLNDDFNTFQHVVACLKKYIPNMTSDRAWELTNQVHYEGQAIVWVGPREQAELYHEQLLRVGLTMAPLEPEGS

SEQ ID NO: 7127 - protein, 95 aa, Thermosynechococcus elongatus; identical to SEQ ID NO: 1893

SEQ ID NO: 7128 - protein, 95 aa, Thermosynechococcus elongatus; identical to SEQ ID NO: 255

SEQ ID NO: 7129 - protein, 95 aa, Thermosynechococcus elongatus; identical to SEQ ID NO: 255

SEQ ID NO: 7130 - protein, 95 aa, Thermosynechococcus elongatus
ASVVPQEGQQVTRKHYPNYKVIVLNDDFNTFQHVVACLKKYIPNMTSDRAWELTNQVLYKGQAIVWVGPQEQAELNHEQLLRAGLTMAPLEAEGS

SEQ ID NO: 7131 - protein, 90 aa, Thermosynechococcus elongatus
ASVVPQEGQQVTRKHYPNYKVIVLNDDFNTFQHVVACLKKYIPNMTSDRAWELTNQVHYKGQATVCVCPQKQAELYHEQLLRAGLTMAPL

SEQ ID NO: 7132 - protein, 95 aa, Thermosynechococcus elongatus
ASVVPQEGQQVTRKHYPNYKVIVLNDDFNTFQHVVACLKKYIPNMTSDRACELTNQVHYEGQAIVWVGPQVQAELYHEQLLRAGLTMAPLEPGGS

SEQ ID NO: 7133 - protein, 95 aa, Thermosynechococcus elongatus
ASVVPQEGQQVTRKHYPNYKVIVLNDDFNTFQHVVACLKKYIPNMSSDRAWELTNQVHYEGLAIVWVGPQEQAELYHEQLLRAGLTLAPLEPEGS

SEQ ID NO: 7134 - protein, 95 aa, Thermosynechococcus elongatus
ASVVPQEGQQVTRKHYPNYKVIVLNDDFNTFQHVVACLKKYIPNMSSDRAWELTNQVHYGGRAIVWVGPQEQAELYHEQLLRAGLTMAPLEPEGS

SEQ ID NO: 7135 - protein, 95 aa, Thermosynechococcus elongatus
ASVVPQEGQQVTRKHYPNYKVIVLNDDFNTFQHVVACLKKYIPNMSSDRAWELTNQVHYVGLAIVRVGPQEQAELYHKQLLRAGLTMAPLEPEGS

SEQ ID NO: 7136 - protein, 95 aa, Thermosynechococcus elongatus
ASVVPQEGQQVTRKHYPNYKVIVLNDDFNTFQHVVACLKKYIPNMSSDRAWELTNQVHYVGLAIVWVGPQVQAELYHEQLLRAGLTMAPLEPGGS

SEQ ID NO: 7137 - protein, 95 aa, Thermosynechococcus elongatus
ASVVPQEGQQVTRKHYPNYKVIVLNDDFNTFQHVVACLKKYIPNMISDRAWELTNQVHYGGRAIVWVGPQGQAELYHEQLLRAGLTMAPLEPEGS

SEQ ID NO: 7138 - protein, 95 aa, Thermosynechococcus elongatus
ASVVPQEGQQVTRKHYPNYKVIVLNDDFNTFQHVVACLKKYIPNMMSDRAWELTNQVHYGGRAIVWVGPQEQAELYHEQLLRAGLTMAPLEPEGS

SEQ ID NO: 7139 - protein, 95 aa, Thermosynechococcus elongatus; identical to SEQ ID NO: 7138

SEQ ID NO: 7140 - protein, 95 aa, Thermosynechococcus elongatus
ASVVPQEGQQVTRKHYPNYKVIVLNDDFNTFQHVVACLKKYIPNMMSDRAWELTNQVHYGGRAIVWVGPQEQAELYPEQLLRAGLTMAPLEPEGS

SEQ ID NO: 7141 - protein, 95 aa, Thermosynechococcus elongatus
ASVVPQEGQQVTRKHYPNYKVIVLNDDFNTFQHVVACLKKYIPNMMSDRAWELTNQVHYGGRAIVWVGPLEQAELYHEQLLRAGLTMAPLDPEGS

SEQ ID NO: 7142 - protein, 95 aa, Thermosynechococcus elongatus
ASVVPQEGQQVTRKHYPNYKVIVLNDDFNTFQHVVACLKKYIPNMIADRAWELTNQVHYGGRAIVWVGPQEQAELYHEQLLRAGLTMAPLEPEGS

SEQ ID NO: 7143 - protein, 95 aa, Thermosynechococcus elongatus; identical to SEQ ID NO: 1

SEQ ID NO: 7144 - protein, 95 aa, Thermosynechococcus elongatus
ASVVPQEGQQVTRKHYPNYKVIVLNDDFNTFQHVVACLKKYIPNMISDRDWELTNKVHYGGRAIVWVGPQEQAELYHEQLLRAGLTMAPLEPEGS

SEQ ID NO: 7145 - protein, 95 aa, Thermosynechococcus elongatus
ASVVPQEGQQVTRKHYPNYKVIVLNDDFNTFQHVVACLKKYIPNMISDRDWELTNQVHYGGRAIVWVGTQEQAELYHEQLLRAGLTMAPLEPEGS

SEQ ID NO: 7146 - protein, 90 aa, Thermosynechococcus elongatus
ASVVPQEGQQVTRKHYPNYKVIVLNDDFNTFQHVVACLKKYIPNMISDRDWELTNQVHYGGRAIVWVGPQEQAELYHEQLLRAGLTMAPL

SEQ ID NO: 7147 - protein, 95 aa, Thermosynechococcus elongatus
ASVVPQEGQQVTRKHYPNYKVIVLNDDFNTFQHVVACLKKYIPNMISDRDWELTNQVHYGGRAIVWVGPQEQAELYHEQLLRAGLTIAPLEPEGS

SEQ ID NO: 7148 - protein, 95 aa, Thermosynechococcus elongatus; identical to SEQ ID NO: 1898

SEQ ID NO: 7149 - protein, 95 aa, Thermosynechococcus elongatus
ASVVPQEGQQVTRKHYPNYKVIVLNDDFNTFQHVVACLKKYIPNMISDRARELTNQVHYKGQAIVWVGPQEQAELNHEQLLRAGLTMAPLEPEGS

SEQ ID NO: 7150 - protein, 73 aa, Thermosynechococcus elongatus
ASVVPQEGQQVTRKHYPNYKVIVLNDDFNTFQHVVACLKKYIPNMISDRARELTNQVHYGGRAIVWVGPQEQA

SEQ ID NO: 7151 - protein, 95 aa, Thermosynechococcus elongatus
ASVVPQEGQQVTRKHYPNYKVIVLNDDFNTFQHVVACLKKYIPNMISDRAWKLTNQVHYGGRAIVWVGPQEQAELYHEQLLRAGLTMAPLEPEGS

SEQ ID NO: 7152 - protein, 52 aa, Thermosynechococcus elongatus
ASVVPQEGQQVTRKHYPNYKVIVLNDDFNTFQHVVACLKKYIPNMISDRAWE

SEQ ID NO: 7153 - protein, 95 aa, Thermosynechococcus elongatus
ASVVPQEGQQVTRKHYPNYKVIVLNDDFNTFQHVVACLKKYIPNMISDRAWESTNQVHYEGQAIVWVGPREQAELYHEQLLRVGLTMAPLEPEGS

SEQ ID NO: 7154 - protein, 80 aa, Thermosynechococcus elongatus
ASVVPQEGQQVTRKHYPNYKVIVLNDDFNTFQHVVACLKKYIPNMISDRAWELTTKFTTEVELSFGLVHKNKLNYTTNNC

SEQ ID NO: 7155 - protein, 95 aa, Thermosynechococcus elongatus; identical to SEQ ID NO: 1

SEQ ID NO: 7156 - protein, 80 aa, Thermosynechococcus elongatus
ASVVPQEGQQVTRKHYPNYKVIVLNDDFNTFQHVVACLKKYIPNMISDRAWELTNKFTTEVELSFGLVHKNKLNYTTNNC

SEQ ID NO: 7157 - protein, 95 aa, Thermosynechococcus elongatus
ASVVPQEGQQVTRKHYPNYKVIVLNDDFNTFQHVVACLKKYIPNMISDRAWELTKQVHYEGQAIVWVGPQEQAELYHEQLLRAGLTMAPLEPEGS

SEQ ID NO: 7158 - protein, 95 aa, Thermosynechococcus elongatus
ASVVPQEGQQVTRKHYPNYKVIVLNDDFNTFQHVVACLKKYIPNMISDRAWELTNKVHYEGQAIVWVGPQEQAELYHEQLLRAGLTMAPLEPEGS

SEQ ID NO: 7159 - protein, 95 aa, Thermosynechococcus elongatus
ASVVPQEGQQVTRKHYPNYKVIVLNDDFNTFQHVVACLKKYIPNMISDRAWELTNKVHYGGRAIVWVGPLEQAELYHEQLLRAGLTMAPLEPEGS

SEQ ID NO: 7160 - protein, 95 aa, Thermosynechococcus elongatus
ASVVPQEGQQVTRKHYPNYKVIVLNDDFNTFQHVVACLKKYIPNMISDRAWELTNQLHAGGRALVWVGPQEQAELYHAHLLRAGLTMAPLEPEGS

SEQ ID NO: 7161 - protein, 95 aa, Thermosynechococcus elongatus
ASVVPQEGQQVTRKHYPNYKVIVLNDDFNTFQHVVACLKKYIPNMISDRAWELTNQLHYGGRAIVWVGPQEQAELYHEQLLRAGLTMAPLEPEGS

SEQ ID NO: 7162 - protein, 95 aa, Thermosynechococcus elongatus; identical to SEQ ID NO: 7161

SEQ ID NO: 7163 - protein, 95 aa, Thermosynechococcus elongatus
ASVVPQEGQQVTRKHYPNYKVIVLNDDFNTFQHVVACLKKYIPNMISDRAWELTNQLHYGGRAIVWVGPQEQAELYHEQLLRAGLTISPLEPEGS

SEQ ID NO: 7164 - protein, 93 aa, Thermosynechococcus elongatus
ASVVPQEGQQVTRKHYPNYKVIVLNDDFNTFQHVVACLKKYIPNMISDRAWELTNQLHYGGRAIVWVGPQEQAELYHEQLLRAGLTMAPLVPE

SEQ ID NO: 7165 - protein, 95 aa, Thermosynechococcus elongatus
ASVVPQEGQQVTRKHYPNYKVIVLNDDFNTFQHVVACLKKYIPNMISDRAWELTNQLHFGGRSIVWVGPQEQAELYHEQLLRAGLSMAPLETERS

SEQ ID NO: 7166 - protein, 95 aa, Thermosynechococcus elongatus
ASVVPQEGQQVTRKHYPNYKVIVLNDDFNTFQHVVACLKKYIPNMISDRAWELTNQAHYGGRAIVWVGPQEQAELYHEQLLRAGLTMAPLEPEGS

SEQ ID NO: 7167 - protein, 80 aa, Thermosynechococcus elongatus
ASVVPQEGQQVTRKHYPNYKVIVLNDDFNTFQHVVACLKKYIPNMISDRAWELTNQVTTEVELSFGLVHKNKLNYTTNNC

SEQ ID NO: 7168 - protein, 95 aa, Thermosynechococcus elongatus
ASVVPQEGQQVTRKHYPNYKVIVLNDDFNTFQHVVACLKKYIPNMISDRAWELTNQVNYEGQAIVWVGPQEQAELYHEQLLRAGLTMAPLEPEGS

SEQ ID NO: 7169 - protein, 95 aa, Thermosynechococcus elongatus
ASVVPQEGQQVTRKHYPNYKVIVLNDDFNTFQHVVACLKKYIPNMISDRAWELTNQVQYGGRAIVWVGPQEQAELYHEQLLRAGLTMAPLEPEGS

SEQ ID NO: 7170 - protein, 95 aa, Thermosynechococcus elongatus
ASVVPQEGQQVTRKHYPNYKVIVLNDDFNTFQHVVACLKKYIPNMISDRAWELTNQVHHGGRAIVWVGPQEQAELYHEQLLRAGLTMAPLEPEGS

SEQ ID NO: 7171 - protein, 95 aa, Thermosynechococcus elongatus; identical to SEQ ID NO: 1125

SEQ ID NO: 7172 - protein, 58 aa, Thermosynechococcus elongatus; identical to SEQ ID NO: 1126

SEQ ID NO: 7173 - protein, 58 aa, Thermosynechococcus elongatus; identical to SEQ ID NO: 1126

SEQ ID NO: 7174 - protein, 95 aa, Thermosynechococcus elongatus
ASVVPQEGQQVTRKHYPNYKVIVLNDDFNTFQHVVACLKKYIPNMISDRAWELTNQVHYKGKAIVWVGPQEQAELNHEQLSRAGLTMAPLEPEGS

SEQ ID NO: 7175 - protein, 90 aa, Thermosynechococcus elongatus
ASVVPQEGQQVTRKHYPNYKVIVLNDDFNTFQHVVACLKKYIPNMISDRAWELTNQVHYKGQAIVWVGPQEQAELNHEQLLRAGLTMAPL

SEQ ID NO: 7176 - protein, 95 aa, Thermosynechococcus elongatus
ASVVPQEGQQVTRKHYPNYKVIVLNDDFNTFQHVVACLKKYIPNMISDRAWELTNQVHYKGQAIVWVGPQEQAELNHEQLLRACLTMAPLEPEGS

SEQ ID NO: 7177 - protein, 95 aa, Thermosynechococcus elongatus
ASVVPQEGQQVTRKHYPNYKVIVLNDDFNTFQHVVACLKKYIPNMISDRAWELTNQVHYKGQAIVWVGPQEQAELNHELLLRAGLTMAPLEPEGS

SEQ ID NO: 7178 - protein, 95 aa, Thermosynechococcus elongatus
ASVVPQEGQQVTRKHYPNYKVIVLNDDFNTFQHVVACLKKYIPNMISDRAWELTNQVHYKGQAIVWVGPQEQAELYHEQLLRAGLTMAPLEPGGS

SEQ ID NO: 7179 - protein, 95 aa, Thermosynechococcus elongatus
ASVVPQEGQQVTRKHYPNYKVIVLNDDFNTFQHVVACLKKYIPNMISDRAWELTNQVHYKGQAIVWVGPQEHAELNHEQLLRAGLTMAPLEPEGS

SEQ ID NO: 7180 - protein, 95 aa, Thermosynechococcus elongatus
ASVVPQEGQQVTRKHYPNYKVIVLNDDFNTFQHVVACLKKYIPNMISDRAWELTNQVHYKGQAIVWVGPQVQAELYHEQLLRAGLTMAPLEPGGS

SEQ ID NO: 7181 - protein, 95 aa, Thermosynechococcus elongatus; identical to SEQ ID NO: 614

SEQ ID NO: 7182 - protein, 95 aa, Thermosynechococcus elongatus; identical to SEQ ID NO: 7180

SEQ ID NO: 7183 - protein, 95 aa, Thermosynechococcus elongatus
ASVVPQEGQQVTRKHYPNYKVIVLNDDFNTFQHVVACLKKYIPNMISDRAWELTNQVHYKGRAIVWVGPQEQAELYHEQLLRAGLTMAPLEPEGS

SEQ ID NO: 7184 - protein, 95 aa, Thermosynechococcus elongatus
ASVVPQEGQQVTRKHYPNYKVIVLNDDFNTFQHVVACLKKYIPNMISDRAWELTNQVHYIGLAIVWVGPQEQAELNHEQLLRAGLTMAPLEPEGS

SEQ ID NO: 7185 - protein, 95 aa, Thermosynechococcus elongatus; identical to SEQ ID NO: 22

SEQ ID NO: 7186 - protein, 95 aa, Thermosynechococcus elongatus
ASVVPQEGQQVTRKHYPNYKVIVLNDDFNTFQHVVACLKKYIPNMISDRAWELTNQVHYEGQAIVRVGTQEQAELYHKQLLRAGLTMAPLEPEGS

SEQ ID NO: 7187 - protein, 95 aa, Thermosynechococcus elongatus
ASVVPQEGQQVTRKHYPNYKVIVLNDDFNTFQHVVACLKKYIPNMISDRAWELTNQVHYEGQAIVWVGPKEQAELYHEQLLRAGLTMAPLEPEGS

SEQ ID NO: 7188 - protein, 95 aa, Thermosynechococcus elongatus; identical to SEQ ID NO: 22

SEQ ID NO: 7189 - protein, 95 aa, Thermosynechococcus elongatus
ASVVPQEGQQVTRKHYPNYKVIVLNDDFNTFQHVVACLKKYIPNMISDRAWELTNQVHYEGQAIVWVGPQEQAELDHEQLLRAGLTMAPLEPEGS

SEQ ID NO: 7190 - protein, 95 aa, Thermosynechococcus elongatus
ASVVPQEGQQVTRKHYPNYKVIVLNDDFNTFQHVVACLKKYIPNMISDRAWELTNQVHYEGQAIVWVGPQEQAELYQEQLLRAGLTMAPLEPEGS

SEQ ID NO: 7191 - protein, 95 aa, Thermosynechococcus elongatus
ASVVPQEGQQVTRKHYPNYKVIVLNDDFNTFQHVVACLKKYIPNMISDRAWELTNQVHYEGQAIVWVGPQEQAELYHEQLSRAGLTMAPLEPEGS

SEQ ID NO: 7192 - protein, 95 aa, Thermosynechococcus elongatus
ASVVPQEGQQVTRKHYPNYKVIVLNDDFNTFQHVVACLKKYIPNMISDRAWELTNQVHYEGQAIVWVGPQEQAELYHEQLLRAGLTRAPLEPEGS

SEQ ID NO: 7193 - protein, 95 aa, Thermosynechococcus elongatus
ASVVPQEGQQVTRKHYPNYKVIVLNDDFNTFQHVVACLKKYIPNMISDRAWELTNQVHYEGQAIVWVGPQEQAELYHEQLLRAGLTMAQLEPEGS

SEQ ID NO: 7194 - protein, 95 aa, Thermosynechococcus elongatus
ASVVPQEGQQVTRKHYPNYKVIVLNDDFNTFQHVVACLKKYIPNMISDRAWELTNQVHYEGQAIVWVGPQEQAELYHEQLLRAGLTIAPLEPEGS

SEQ ID NO: 7195 - protein, 95 aa, Thermosynechococcus elongatus; identical to SEQ ID NO: 7194

SEQ ID NO: 7196 - protein, 95 aa, Thermosynechococcus elongatus
ASVVPQEGQQVTRKHYPNYKVIVLNDDFNTFQHVVACLKKYIPNMISDRAWELTNQVHYEGQAIVWVGPQEQAELYHEQLLRVGLTMAPLEPEGS

SEQ ID NO: 7197 - protein, 95 aa, Thermosynechococcus elongatus
ASVVPQEGQQVTRKHYPNYKVIVLNDDFNTFQHVVACLKKYIPNMISDRAWELTNQVHYEGQAIVWVGPQEQAELYPEQLWRAGLTMAPLEPEGS

SEQ ID NO: 7198 - protein, 95 aa, Thermosynechococcus elongatus
ASVVPQEGQQVTRKHYPNYKVIVLNDDFNTFQHVVACLKKYIPNMISDRAWELTNQVHYEGQAIVWVGPQEQAELYREQLLRAGLTMAPLEPEGS

SEQ ID NO: 7199 - protein, 95 aa, Thermosynechococcus elongatus
ASVVPQEGQQVTRKHYPNYKVIVLNDDFNTFQHVVACLKKYIPNMISDRAWELTNQVHYEGQAIVWVGPQEQAEFYHEQLLRAGLTMAPLEPEGS

SEQ ID NO: 7200 - protein, 95 aa, Thermosynechococcus elongatus
ASVVPQEGQQVTRKHYPNYKVIVLNDDFNTFQHVVACLKKYIPNMISDRAWELTNQVHYEGQAIVWVGPQERAELYHEQLLRAGLTMAPLEPEGS

SEQ ID NO: 7201 - protein, 95 aa, Thermosynechococcus elongatus
ASVVPQEGQQVTRKHYPNYKVIVLNDDFNTFQHVVACLKKYIPNMISDRAWELTNQVHYEGQAIVWVGPQVQAELYHEKLLRAGLTMAPLEPEGS

SEQ ID NO: 7202 - protein, 95 aa, Thermosynechococcus elongatus
ASVVPQEGQQVTRKHYPNYKVIVLNDDFNTFQHVVACLKKYIPNMISDRAWELTNQVHYEGQAIVWVGPQVQAELYHEQLLRTGLTMAPLEPEGS

SEQ ID NO: 7203 - protein, 95 aa, Thermosynechococcus elongatus; identical to SEQ ID NO: 46

SEQ ID NO: 7204 - protein, 95 aa, Thermosynechococcus elongatus
ASVVPQEGQQVTRKHYPNYKVIVLNDDFNTFQHVVACLKKYIPNMISDRAWELTNQVHYEGQAIVWVGPQVQAELYHEQLLRAGLTMAQLEPEGS

SEQ ID NO: 7205 - protein, 95 aa, Thermosynechococcus elongatus
ASVVPQEGQQVTRKHYPNYKVIVLNDDFNTFQHVVACLKKYIPNMISDRAWELTNQVHYEGQAIVWVGPQVQAELYHEQLLRAGLTLAPLEPGGS

SEQ ID NO: 7206 - protein, 95 aa, Thermosynechococcus elongatus
ASVVPQEGQQVTRKHYPNYKVIVLNDDFNTFQHVVACLKKYIPNMISDRAWELTNQVHYEGQAIVWVGPQVQAELYHEQLLRSGLTMAPLEPGGS

SEQ ID NO: 7207 - protein, 95 aa, Thermosynechococcus elongatus
ASVVPQEGQQVTRKHYPNYKVIVLNDDFNTFQHVVACLKKYIPNMISDRAWELTNQVHYEGQAIVWVGSQEQAELYHEQLLRAGLTMAPLEPGGS

SEQ ID NO: 7208 - protein, 95 aa, Thermosynechococcus elongatus
ASVVPQEGQQVTRKHYPNYKVIVLNDDFNTFQHVVACLKKYIPNMISDRAWELTNQVHYEGQAIVCVGPQEQAELYHEQLLRAGLTMAPLEPEGS

SEQ ID NO: 7209 - protein, 95 aa, Thermosynechococcus elongatus
ASVVPQEGQQVTRKHYPNYKVIVLNDDFNTFQHVVACLKKYIPNMISDRAWELTNQVHYEGQSIVWVGPQEQAELYHEQLLRAGLTMAPLEPEGS

SEQ ID NO: 7210 - protein, 95 aa, Thermosynechococcus elongatus
ASVVPQEGQQVTRKHYPNYKVIVLNDDFNTFQHVVACLKKYIPNMISDRAWELTNQVHYEGHAIVWVGPQKQAELYHEQLLRAGLTMAPLEPEGS

SEQ ID NO: 7211 - protein, 95 aa, Thermosynechococcus elongatus
ASVVPQEGQQVTRKHYPNYKVIVLNDDFNTFQHVVACLKKYIPNMISDRAWELTNQVHYEGLAIVWVGPQEQAELYHEQLLRAGLTMAPLEPEGS

SEQ ID NO: 7212 - protein, 95 aa, Thermosynechococcus elongatus
ASVVPQEGQQVTRKHYPNYKVIVLNDDFNTFQHVVACLKKYIPNMISDRAWELTNQVHYDGQAIVWVGPQVQAELYHEQLLRAGLTMAPLEPGGS

SEQ ID NO: 7213 - protein, 95 aa, Thermosynechococcus elongatus; identical to SEQ ID NO: 46

SEQ ID NO: 7214 - protein, 95 aa, Thermosynechococcus elongatus
ASVVPQEGQQVTRKHYPNYKVIVLNDDFNTFQHVVACLKKYIPNMISDRAWELTNQVHYAGLAIVWVGPQEQAELYHEQLLRAGLTMAPLEPEGS

SEQ ID NO: 7215 - protein, 95 aa, Thermosynechococcus elongatus
ASVVPQEGQQVTRKHYPNYKVIVLNDDFNTFQHVVACLKKYIPNMISDRAWELTNQVHYGSRAIVWVGPQEQAELYHEQLLRAGLTMAPLEPEGS

SEQ ID NO: 7216 - protein, 95 aa, Thermosynechococcus elongatus
ASVVPQEGQQVTRKHYPNYKVIVLNDDFNTFQHVVACLKKYIPNMISDRAWELTNQVHYGDRAIVWVGPQEQAELYHEQLLRAGLTMAPLEPEGS

SEQ ID NO: 7217 - protein, 95 aa, Thermosynechococcus elongatus; identical to SEQ ID NO: 1

SEQ ID NO: 7218 - protein, 95 aa, Thermosynechococcus elongatus; identical to SEQ ID NO: 1

SEQ ID NO: 7219 - protein, 95 aa, Thermosynechococcus elongatus; identical to SEQ ID NO: 49

SEQ ID NO: 7220 - protein, 95 aa, Thermosynechococcus elongatus
ASVVPQEGQQVTRKHYPNYKVIVLNDDFNTFQHVVACLKKYIPNMISDRAWELTNQVHYGGQAIVWVGPQEQAELNHEQLLIAGLTMAPLEPEGS

SEQ ID NO: 7221 - protein, 95 aa, Thermosynechococcus elongatus
ASVVPQEGQQVTRKHYPNYKVIVLNDDFNTFQHVVACLKKYIPNMISDRAWELTNQVHYGGQAIVRVGPQEQAELYHKQLLRAGFTMAPLEPEGS

SEQ ID NO: 7222 - protein, 95 aa, Thermosynechococcus elongatus; identical to SEQ ID NO: 81

SEQ ID NO: 7223 - protein, 95 aa, Thermosynechococcus elongatus
ASVVPQEGQQVTRKHYPNYKVIVLNDDFNTFQHVVACLKKYIPNMISDRAWELTNQVHYGGQAIVWVGPQEQAELYHEQLLRAGLTMAPLEPKGS

SEQ ID NO: 7224 - protein, 93 aa, Thermosynechococcus elongatus
ASVVPQEGQQVTRKHYPNYKVIVLNDDFNTFQHVVACLKKYIPNMISDRAWELTNQVHYGGQAIVWVGPQEQAELYHEQLLRAGLTMAPLEPE

SEQ ID NO: 7225 - protein, 95 aa, Thermosynechococcus elongatus
ASVVPQEGQQVTRKHYPNYKVIVLNDDFNTFQHVVACLKKYIPNMISDRAWELTNQVHYGGQAIVWVGPQEQAELYHEQLLRAGLTMAPLEPGGS

SEQ ID NO: 7226 - protein, 95 aa, Thermosynechococcus elongatus
ASVVPQEGQQVTRKHYPNYKVIVLNDDFNTFQHVVACLKKYIPNMISDRAWELTNQVHYGGQAIVWVGPQEQAELYHEQLLSAGLTMAPLEPGGS

SEQ ID NO: 7227 - protein, 81 aa, Thermosynechococcus elongatus
ASVVPQEGQQVTRKHYPNYKVIVLNDDFNTFQHVVACLKKYIPNMISDRAWELTNQVHYGGQAIVWVGPQEQAELYHEQLL

SEQ ID NO: 7228 - protein, 95 aa, Thermosynechococcus elongatus; identical to SEQ ID NO: 81

SEQ ID NO: 7229 - protein, 95 aa, Thermosynechococcus elongatus
ASVVPQEGQQVTRKHYPNYKVIVLNDDFNTFQHVVACLKKYIPNMISDRAWELTNQVHYGGQAIVWVGPQERAELYHEQLLRAGLTMAPLEPEGS

SEQ ID NO: 7230 - protein, 95 aa, Thermosynechococcus elongatus
ASVVPQEGQQVTRKHYPNYKVIVLNDDFNTFQHVVACLKKYIPNMISDRAWELTNQVHYGGQAIVWVGPQVQAELYHEQLLRAGLTMAPLEPEGS

SEQ ID NO: 7231 - protein, 95 aa, Thermosynechococcus elongatus
ASVVPQEGQQVTRKHYPNYKVIVLNDDFNTFQHVVACLKKYIPNMISDRAWELTNQVHYGGPAIVWVGPQEQAELYHEQLLRAGLTMAPLEPEGS

SEQ ID NO: 7232 - protein, 95 aa, Thermosynechococcus elongatus
ASVVPQEGQQVTRKHYPNYKVIVLNDDFNTFQHVVACLKKYIPNMISDRAWELTNQVHYGGRTIVWVGPQEQAELYHEQLLRAGLTMAPLEPEGS

SEQ ID NO: 7233 - protein, 95 aa, Thermosynechococcus elongatus; identical to SEQ ID NO: 1

SEQ ID NO: 7234 - protein, 95 aa, Thermosynechococcus elongatus
ASVVPQEGQQVTRKHYPNYKVIVLNDDFNTFQHVVACLKKYIPNMISDRAWELTNQVHYGGRANVWVGPQEQAELYHEQVLRAGLTMAPLEPEGS

SEQ ID NO: 7235 - protein, 95 aa, Thermosynechococcus elongatus
ASVVPQEGQQVTRKHYPNYKVIVLNDDFNTFQHVVACLKKYIPNMISDRAWELTNQVHYGGRASVWVGPQEQAELYHEQLLRAGLTLAPLEPEGS

SEQ ID NO: 7236 - protein, 95 aa, Thermosynechococcus elongatus; identical to SEQ ID NO: 1134

SEQ ID NO: 7237 - protein, 95 aa, Thermosynechococcus elongatus; identical to SEQ ID NO: 1916

SEQ ID NO: 7238 - protein, 95 aa, Thermosynechococcus elongatus; identical to SEQ ID NO: 257

SEQ ID NO: 7239 - protein, 95 aa, Thermosynechococcus elongatus
ASVVPQEGQQVTRKHYPNYKVIVLNDDFNTFQHVVACLKKYIPNMISDRAWELTNQVHYGGRAIVWVGPQEQAELYHEQLLRAGLTMAPMEPEGS

SEQ ID NO: 7240 - protein, 95 aa, Thermosynechococcus elongatus; identical to SEQ ID NO: 1

SEQ ID NO: 7241 - protein, 95 aa, Thermosynechococcus elongatus; identical to SEQ ID NO: 30

SEQ ID NO: 7242 - protein, 95 aa, Thermosynechococcus elongatus; identical to SEQ ID NO: 274

SEQ ID NO: 7243 - protein, 95 aa, Thermosynechococcus elongatus
ASVVPQEGQQVTRKHYPNYKVIVLNDDFNTFQHVVACLKKYIPNMISDRAWELTNQVHYGGRAIVWVGPQEQAELYHEQLLRSGLTIATLEPEGS

SEQ ID NO: 7244 - protein, 95 aa, Thermosynechococcus elongatus
ASVVPQEGQQVTRKHYPNYKVIVLNDDFNTFQHVVACLKKYIPNMISDRAWELTNQVHYGGRAIVWVGPQEQAELYHEQLFRAGLTMATLEPEGS

SEQ ID NO: 7245 - protein, 95 aa, Thermosynechococcus elongatus
ASVVPQEGQQVTRKHYPNYKVIVLNDDFNTFQHVVACLKKYIPNMISDRAWELTNQVHYGGRAIVWVGPQEQAELYHELLLRAGLTMAPLEAEGS

SEQ ID NO: 7246 - protein, 95 aa, Thermosynechococcus elongatus; identical to SEQ ID NO: 303

SEQ ID NO: 7247 - protein, 95 aa, Thermosynechococcus elongatus
ASVVPQEGQQVTRKHYPNYKVIVLNDDFNTFQHVVACLKKYIPNMISDRAWELTNQVHYGGRAIIWVGPQEQAELYHEQLLRAGLTMAPLEPEGS

SEQ ID NO: 7248 - protein, 95 aa, Thermosynechococcus elongatus
ASVVPQEGQQVTRKHYPNYKVIVLNDDFNTFQHVVACLKKYIPNMISDRAWELTNQVHYGGRAIDWVGPQEQAELYHEQLLRAGLTMAPLEPEGS

SEQ ID NO: 7249 - protein, 95 aa, Thermosynechococcus elongatus
ASVVPQEGQQVTRKHYPNYKVIVLNDDFNTFQHVVACLKKYIPNMISDRAWELTNQVHYGGRAIGWVGPQEQAELYHEQLLRAGLTMAPLEPEGS

SEQ ID NO: 7250 - protein, 95 aa, Thermosynechococcus elongatus; identical to SEQ ID NO: 427

SEQ ID NO: 7251 - protein, 95 aa, Thermosynechococcus elongatus; identical to SEQ ID NO: 204

SEQ ID NO: 7252 - protein, 95 aa, Thermosynechococcus elongatus; identical to SEQ ID NO: 30

SEQ ID NO: 7253 - protein, 95 aa, Thermosynechococcus elongatus; identical to SEQ ID NO: 1

SEQ ID NO: 7254 - protein, 80 aa, Thermosynechococcus elongatus
ASVVPQEGQQVTRKHYPNYKVIVLNDDFNTFQHVVACLKKYIPNMISDRAWELTNQVHYGGRAIVWLVHKNKLNYTTNNC

SEQ ID NO: 7255 - protein, 65 aa, Thermosynechococcus elongatus
ASVVPQEGQQVTRKHYPNYKVIVLNDDFNTFQHVVACLKKYIPNMISDRAWELTNQVHYGGRAIV

SEQ ID NO: 7256 - protein, 95 aa, Thermosynechococcus elongatus; identical to SEQ ID NO: 240

SEQ ID NO: 7257 - protein, 70 aa, Thermosynechococcus elongatus
ASVVPQEGQQVTRKHYPNYKVIVLNDDFNTFQHVVACLKKYIPNMISDRAWELTNQVHYGGRAIVWIGPQ

SEQ ID NO: 7258 - protein, 80 aa, Thermosynechococcus elongatus
ASVVPQEGQQVTRKHYPNYKVIVLNDDFNTFQHVVACLKKYIPNMISDRAWELTNQVHYGGRAIVWVVHKNKLNYTTNNC

SEQ ID NO: 7259 - protein, 95 aa, Thermosynechococcus elongatus; identical to SEQ ID NO: 6696

SEQ ID NO: 7260 - protein, 95 aa, Thermosynechococcus elongatus
ASVVPQEGQQVTRKHYPNYKVIVLNDDFNTFQHVVACLKKYIPNMISDRAWELTNQVHYGGRAIVWGGPQEQAELYHEQWLRAGLTMAPLEPEGS

SEQ ID NO: 7261 - protein, 95 aa, Thermosynechococcus elongatus; identical to SEQ ID NO: 1

SEQ ID NO: 7262 - protein, 95 aa, Thermosynechococcus elongatus; identical to SEQ ID NO: 1

SEQ ID NO: 7263 - protein, 95 aa, Thermosynechococcus elongatus; identical to SEQ ID NO: 1

SEQ ID NO: 7264 - protein, 95 aa, Thermosynechococcus elongatus
ASVVPQEGQQVTRKHYPNYKVIVLNDDFNTFQHVVACLKKYIPNMISDRAWELTNQVHYGGRAIVWVSPQEQAELYHEQLLRAGLTMAPLEPEGS

SEQ ID NO: 7265 - protein, 95 aa, Thermosynechococcus elongatus
ASVVPQEGQQVTRKHYPNYKVIVLNDDFNTFQHVVACLKKYIPNMISDRAWELTNQVHYGGRAIVWVAPQEQAELYHEQLLRAGLTMAPLEPEGS

SEQ ID NO: 7266 - protein, 95 aa, Thermosynechococcus elongatus; identical to SEQ ID NO: 1

SEQ ID NO: 7267 - protein, 95 aa, Thermosynechococcus elongatus
ASVVPQEGQQVTRKHYPNYKVIVLNDDFNTFQHVVACLKKYIPNMISDRAWELTNQVHYGGRAIVWVGPQEQAEFSHEQWLRAGLTMAPLEPEGS

SEQ ID NO: 7268 - protein, 87 aa, Thermosynechococcus elongatus
ASVVPQEGQQVTRKHYPNYKVIVLNDDFNTFQHVVACLKKYIPNMISDRAWELTNQVHYGGRAIVWVGPRTIVESWFDYGSTGTRRI

SEQ ID NO: 7269 - protein, 80 aa, Thermosynechococcus elongatus
ASVVPQEGQQVTRKHYPNYKVIVLNDDFNTFQHVVACLKKYIPNMISDRAWELTNQVHYGGRAIVWVGHKNKLNYTTNNC

SEQ ID NO: 7270 - protein, 95 aa, Thermosynechococcus elongatus; identical to SEQ ID NO: 370

SEQ ID NO: 7271 - protein, 95 aa, Thermosynechococcus elongatus
ASVVPQEGQQVTRKHYPNYKVIVLNDDFNTFQHVVACLKKYIPNMISDRAWELTNQVHYGGRAIVWVGQQEQAELYHEHLLRAGLTMAPLVPEGS

SEQ ID NO: 7272 - protein, 95 aa, Thermosynechococcus elongatus
ASVVPQEGQQVTRKHYPNYKVIVLNDDFNTFQHVVACLKKYIPNMISDRAWELTNQVHYGGRAIVWVGPKEQAELYHEQLLRAGLTMAPLEPEGS

SEQ ID NO: 7273 - protein, 95 aa, Thermosynechococcus elongatus
ASVVPQEGQQVTRKHYPNYKVIVLNDDFNTFQHVVACLKKYIPNMISDRAWELTNQVHYGGRAIVWVGPQKQAELYHEQLLRAGLTMAPLEPEGS

SEQ ID NO: 7274 - protein, 80 aa, Thermosynechococcus elongatus
ASVVPQEGQQVTRKHYPNYKVIVLNDDFNTFQHVVACLKKYIPNMISDRAWELTNQVHYGGRAIVWVGPQEKLNYTTNNC

SEQ ID NO: 7275 - protein, 95 aa, Thermosynechococcus elongatus
ASVVPQEGQQVTRKHYPNYKVIVLNDDFNTFQHVVACLKKYIPNMISDRAWELTNQVHYGGRAIVWVGPQEKAELYHEQLLRAGLTMAPLEPEGS

SEQ ID NO: 7276 - protein, 95 aa, Thermosynechococcus elongatus
ASVVPQEGQQVTRKHYPNYKVIVLNDDFNTFQHVVACLKKYIPNMISDRAWELTNQVHYGGRAIVWVGPQEQDELYHEQLLRAGLTMAPLEPEGS

SEQ ID NO: 7277 - protein, 95 aa, Thermosynechococcus elongatus; identical to SEQ ID NO: 1

SEQ ID NO: 7278 - protein, 95 aa, Thermosynechococcus elongatus; identical to SEQ ID NO: 1

SEQ ID NO: 7279 - protein, 95 aa, Thermosynechococcus elongatus; identical to SEQ ID NO: 1

SEQ ID NO: 7280 - protein, 95 aa, Thermosynechococcus elongatus
ASVVPQEGQQVTRKHYPNYKVIVLNDDFNTFQHVVACLKKYIPNMISDRAWELTNQVHYGGRAIVWVGPQEQAKLYHEHLLRAGLTMAPLEPGGS

SEQ ID NO: 7281 - protein, 95 aa, Thermosynechococcus elongatus
ASVVPQEGQQVTRKHYPNYKVIVLNDDFNTFQHVVACLKKYIPNMISDRAWELTNQVHYGGRAIVWVGPQEQAEIYHEQLLRAGLTMAPLEPEGS

SEQ ID NO: 7282 - protein, 95 aa, Thermosynechococcus elongatus
ASVVPQEGQQVTRKHYPNYKVIVLNDDFNTFQHVVACLKKYIPNMISDRAWELTNQVHYGGRAIVWVGPQEQAEVYHEQLLRAGLTMAPLEPEGS

SEQ ID NO: 7283 - protein, 74 aa, Thermosynechococcus elongatus; identical to SEQ ID NO: 6806

SEQ ID NO: 7284 - protein, 95 aa, Thermosynechococcus elongatus
ASVVPQEGQQVTRKHYPNYKVIVLNDDFNTFQHVVACLKKYIPNMISDRAWELTNQVHYGGRAIVWVGPQEQAELNHEQVLRAGLTMAPLEPEGS

SEQ ID NO: 7285 - protein, 95 aa, Thermosynechococcus elongatus
ASVVPQEGQQVTRKHYPNYKVIVLNDDFNTFQHVVACLKKYIPNMISDRAWELTNQVHYGGRAIVWVGPQEQAELNHEQLLRAGLTMAPLEPKGS

SEQ ID NO: 7286 - protein, 95 aa, Thermosynechococcus elongatus
ASVVPQEGQQVTRKHYPNYKVIVLNDDFNTFQHVVACLKKYIPNMISDRAWELTNQVHYGGRAIVWVGPQEQAELNHEQLLRAGLTMAPLEAEGS

SEQ ID NO: 7287 - protein, 95 aa, Thermosynechococcus elongatus
ASVVPQEGQQVTRKHYPNYKVIVLNDDFNTFQHVVACLKKYIPNMISDRAWELTNQVHYGGRAIVWVGPQEQAELNHEQLLRAGLTMSQLEPEGS

SEQ ID NO: 7288 - protein, 95 aa, Thermosynechococcus elongatus
ASVVPQEGQQVTRKHYPNYKVIVLNDDFNTFQHVVACLKKYIPNMISDRAWELTNQVHYGGRAIVWVGPQEQAELNHEQLLRAVLTMAPLEPEGS

SEQ ID NO: 7289 - protein, 95 aa, Thermosynechococcus elongatus
ASVVPQEGQQVTRKHYPNYKVIVLNDDFNTFQHVVACLKKYIPNMISDRAWELTNQVHYGGRAIVWVGPQEQAELNHEQLFRAGLTMAPLEPEGS

SEQ ID NO: 7290 - protein, 95 aa, Thermosynechococcus elongatus
ASVVPQEGQQVTRKHYPNYKVIVLNDDFNTFQHVVACLKKYIPNMISDRAWELTNQVHYGGRAIVWVGPQEQAELDHEQLWRAGLTMAPLEPEGS

SEQ ID NO: 7291 - protein, 95 aa, Thermosynechococcus elongatus
ASVVPQEGQQVTRKHYPNYKVIVLNDDFNTFQHVVACLKKYIPNMISDRAWELTNQVHYGGRAIVWVGPQEQAELYNEQLLRAGLTMAPLEPGGS

SEQ ID NO: 7292 - protein, 95 aa, Thermosynechococcus elongatus
ASVVPQEGQQVTRKHYPNYKVIVLNDDFNTFQHVVACLKKYIPNMISDRAWELTNQVHYGGRAIVWVGPQEQAELYQEQLLRAGLTMAPLEPEGS

SEQ ID NO: 7293 - protein, 95 aa, Thermosynechococcus elongatus
ASVVPQEGQQVTRKHYPNYKVIVLNDDFNTFQHVVACLKKYIPNMISDRAWELTNQVHYGGRAIVWVGPQEQAELYQEPLLRAGLTMAPLEPEGS

SEQ ID NO: 7294 - protein, 95 aa, Thermosynechococcus elongatus; identical to SEQ ID NO: 1917

SEQ ID NO: 7295 - protein, 95 aa, Thermosynechococcus elongatus; identical to SEQ ID NO: 1137

SEQ ID NO: 7296 - protein, 95 aa, Thermosynechococcus elongatus
ASVVPQEGQQVTRKHYPNYKVIVLNDDFNTFQHVVACLKKYIPNMISDRAWELTNQVHYGGRAIVWVGPQEQAELYHEQVLRAGLTMVPLEAEGS

SEQ ID NO: 7297 - protein, 79 aa, Thermosynechococcus elongatus; identical to SEQ ID NO: 1138

SEQ ID NO: 7298 - protein, 95 aa, Thermosynechococcus elongatus; identical to SEQ ID NO: 803

SEQ ID NO: 7299 - protein, 95 aa, Thermosynechococcus elongatus; identical to SEQ ID NO: 1

SEQ ID NO: 7300 - protein, 95 aa, Thermosynechococcus elongatus; identical to SEQ ID NO: 1

SEQ ID NO: 7301 - protein, 95 aa, Thermosynechococcus elongatus
ASVVPQEGQQVTRKHYPNYKVIVLNDDFNTFQHVVACLKKYIPNMISDRAWELTNQVHYGGRAIVWVGPQEQAELYHEQFLRAGLTMAPLEPDGS

SEQ ID NO: 7302 - protein, 95 aa, Thermosynechococcus elongatus; identical to SEQ ID NO: 7301

SEQ ID NO: 7303 - protein, 95 aa, Thermosynechococcus elongatus
ASVVPQEGQQVTRKHYPNYKVIVLNDDFNTFQHVVACLKKYIPNMISDRAWELTNQVHYGGRAIVWVGPQEQAELYHEQLVRAGLTRAPLEPEGS

SEQ ID NO: 7304 - protein, 95 aa, Thermosynechococcus elongatus
ASVVPQEGQQVTRKHYPNYKVIVLNDDFNTFQHVVACLKKYIPNMISDRAWELTNQVHYGGRAIVWVGPQEQAELYHEQLWRAGLTRAPLEPEGS

SEQ ID NO: 7305 - protein, 95 aa, Thermosynechococcus elongatus; identical to SEQ ID NO: 1

SEQ ID NO: 7306 - protein, 93 aa, Thermosynechococcus elongatus
ASVVPQEGQQVTRKHYPNYKVIVLNDDFNTFQHVVACLKKYIPNMISDRAWELTNQVHYGGRAIVWVGPQEQAELYHEQLLRFDYGSIGTRRI

SEQ ID NO: 7307 - protein, 95 aa, Thermosynechococcus elongatus
ASVVPQEGQQVTRKHYPNYKVIVLNDDFNTFQHVVACLKKYIPNMISDRAWELTNQVHYGGRAIVWVGPQEQAELYHEQLLKAGLTMATLEPGGS

SEQ ID NO: 7308 - protein, 95 aa, Thermosynechococcus elongatus
ASVVPQEGQQVTRKHYPNYKVIVLNDDFNTFQHVVACLKKYIPNMISDRAWELTNQVHYGGRAIVWVGPQEQAELYHEQLLKAGLTMAPLEPEGS

SEQ ID NO: 7309 - protein, 95 aa, Thermosynechococcus elongatus; identical to SEQ ID NO: 204

SEQ ID NO: 7310 - protein, 95 aa, Thermosynechococcus elongatus
ASVVPQEGQQVTRKHYPNYKVIVLNDDFNTFQHVVACLKKYIPNMISDRAWELTNQVHYGGRAIVWVGPQEQAELYHEQLLRAGLTMAPLEPQGS

SEQ ID NO: 7311 - protein, 95 aa, Thermosynechococcus elongatus; identical to SEQ ID NO: 1

SEQ ID NO: 7312 - protein, 95 aa, Thermosynechococcus elongatus; identical to SEQ ID NO: 30

SEQ ID NO: 7313 - protein, 95 aa, Thermosynechococcus elongatus
ASVVPQEGQQVTRKHYPNYKVIVLNDDFNTFQHVVACLKKYIPNMISDRAWELTNQVHYGGRAIVWVGPQEQAELYHEQLLRASLTMAPLEPEGS

SEQ ID NO: 7314 - protein, 95 aa, Thermosynechococcus elongatus; identical to SEQ ID NO: 1

SEQ ID NO: 7315 - protein, 84 aa, Thermosynechococcus elongatus; identical to SEQ ID NO: 1141

SEQ ID NO: 7316 - protein, 95 aa, Thermosynechococcus elongatus; identical to SEQ ID NO: 1143

SEQ ID NO: 7317 - protein, 95 aa, Thermosynechococcus elongatus
ASVVPQEGQQVTRKHYPNYKVIVLNDDFNTFQHVVACLKKYIPNMISDRAWELTNQVHYGGRAIVWVGPQEQAELYHEQLLRAGLTRAPLEAEGS

SEQ ID NO: 7318 - protein, 95 aa, Thermosynechococcus elongatus
ASVVPQEGQQVTRKHYPNYKVIVLNDDFNTFQHVVACLKKYIPNMISDRAWELTNQVHYGGRAIVWVGPQEQAELYHEQLLRAGLTMTPLEPEGS

SEQ ID NO: 7319 - protein, 95 aa, Thermosynechococcus elongatus; identical to SEQ ID NO: 1

SEQ ID NO: 7320 - protein, 95 aa, Thermosynechococcus elongatus; identical to SEQ ID NO: 30

SEQ ID NO: 7321 - protein, 95 aa, Thermosynechococcus elongatus
ASVVPQEGQQVTRKHYPNYKVIVLNDDFNTFQHVVACLKKYIPNMISDRAWELTNQVHYGGRAIVWVGPQEQAELYHEQLLRAGLTMATMEPEGS

SEQ ID NO: 7322 - protein, 95 aa, Thermosynechococcus elongatus
ASVVPQEGQQVTRKHYPNYKVIVLNDDFNTFQHVVACLKKYIPNMISDRAWELTNQVHYGGRAIVWVGPQEQAELYHEQLLRAGLTMATLEPDGS

SEQ ID NO: 7323 - protein, 95 aa, Thermosynechococcus elongatus
ASVVPQEGQQVTRKHYPNYKVIVLNDDFNTFQHVVACLKKYIPNMISDRAWELTNQVHYGGRAIVWVGPQEQAELYHEQLLRAGLTMATLEPGGS

SEQ ID NO: 7324 - protein, 95 aa, Thermosynechococcus elongatus; identical to SEQ ID NO: 7239

SEQ ID NO: 7325 - protein, 95 aa, Thermosynechococcus elongatus; identical to SEQ ID NO: 1

SEQ ID NO: 7326 - protein, 95 aa, Thermosynechococcus elongatus; identical to SEQ ID NO: 7310

SEQ ID NO: 7327 - protein, 95 aa, Thermosynechococcus elongatus
ASVVPQEGQQVTRKHYPNYKVIVLNDDFNTFQHVVACLKKYIPNMISDRAWELTNQVHYGGRAIVWVGPQEQAELYHEQLLRAGLTMAPLEPERS

SEQ ID NO: 7328 - protein, 95 aa, Thermosynechococcus elongatus
ASVVPQEGQQVTRKHYPNYKVIVLNDDFNTFQHVVACLKKYIPNMISDRAWELTNQVHYGGRAIVWVGPQEQAELYHEQLLRAGLTMAPLEPVGS

SEQ ID NO: 7329 - protein, 95 aa, Thermosynechococcus elongatus; identical to SEQ ID NO: 1

SEQ ID NO: 7330 - protein, 95 aa, Thermosynechococcus elongatus
ASVVPQEGQQVTRKHYPNYKVIVLNDDFNTFQHVVACLKKYIPNMISDRAWELTNQVHYGGRAIVWVGPQEQAELYHEQLLRAGLTMAPLELEGS

SEQ ID NO: 7331 - protein, 95 aa, Thermosynechococcus elongatus
ASVVPQEGQQVTRKHYPNYKVIVLNDDFNTFQHVVACLKKYIPNMISDRAWELTNQVHYGGRAIVWVGPQEQAELYHEQLLRAGLTMAPLEAEGS

SEQ ID NO: 7332 - protein, 95 aa, Thermosynechococcus elongatus
ASVVPQEGQQVTRKHYPNYKVIVLNDDFNTFQHVVACLKKYIPNMISDRAWELTNQVHYGGRAIVWVGPQEQAELYHEQLLRAGLTMAPLESEGS

SEQ ID NO: 7333 - protein, 95 aa, Thermosynechococcus elongatus; identical to SEQ ID NO: 1

SEQ ID NO: 7334 - protein, 95 aa, Thermosynechococcus elongatus; identical to SEQ ID NO: 1930

SEQ ID NO: 7335 - protein, 95 aa, Thermosynechococcus elongatus
ASVVPQEGQQVTRKHYPNYKVIVLNDDFNTFQHVVACLKKYIPNMISDRAWELTNQVHYGGRAIVWVGPQEQAELYHEQLLRAGLTMAPLGPEGS

SEQ ID NO: 7336 - protein, 93 aa, Thermosynechococcus elongatus
ASVVPQEGQQVTRKHYPNYKVIVLNDDFNTFQHVVACLKKYIPNMISDRAWELTNQVHYGGRAIVWVGPQEQAELYHEQLLRAGLTMAPLVPE

SEQ ID NO: 7337 - protein, 95 aa, Thermosynechococcus elongatus; identical to SEQ ID NO: 808

SEQ ID NO: 7338 - protein, 95 aa, Thermosynechococcus elongatus; identical to SEQ ID NO: 1146

SEQ ID NO: 7339 - protein, 95 aa, Thermosynechococcus elongatus; identical to SEQ ID NO: 808

SEQ ID NO: 7340 - protein, 90 aa, Thermosynechococcus elongatus; identical to SEQ ID NO: 428

SEQ ID NO: 7341 - protein, 92 aa, Thermosynechococcus elongatus
ASVVPQEGQQVTRKHYPNYKVIVLNDDFNTFQHVVACLKKYIPNMISDRAWELTNQVHYGGRAIVWVGPQEQAELYHEQLLRAGLTMAPFEP

SEQ ID NO: 7342 - protein, 95 aa, Thermosynechococcus elongatus; identical to SEQ ID NO: 1

SEQ ID NO: 7343 - protein, 95 aa, Thermosynechococcus elongatus; identical to SEQ ID NO: 1

SEQ ID NO: 7344 - protein, 95 aa, Thermosynechococcus elongatus
ASVVPQEGQQVTRKHYPNYKVIVLNDDFNTFQHVVACLKKYIPNMISDRAWELTNQVHYGGRAIVWVGPQEQAELYHEQLLRAGLTMAALEPEGS

SEQ ID NO: 7345 - protein, 95 aa, Thermosynechococcus elongatus; identical to SEQ ID NO: 1932

SEQ ID NO: 7346 - protein, 95 aa, Thermosynechococcus elongatus
ASVVPQEGQQVTRKHYPNYKVIVLNDDFNTFQHVVACLKKYIPNMISDRAWELTNQVHYGGRAIVWVGPQEQAELYHEQLLRAGLTMASLEPDGS

SEQ ID NO: 7347 - protein, 95 aa, Thermosynechococcus elongatus
ASVVPQEGQQVTRKHYPNYKVIVLNDDFNTFQHVVACLKKYIPNMISDRAWELTNQVHYGGRAIVWVGPQEQAELYHEQLLRAGLTWAPLEPEGS

SEQ ID NO: 7348 - protein, 95 aa, Thermosynechococcus elongatus
ASVVPQEGQQVTRKHYPNYKVIVLNDDFNTFQHVVACLKKYIPNMISDRAWELTNQVHYGGRAIVWVGPQEQAELYHEQLLRAGLIMAPLEPEGS

SEQ ID NO: 7349 - protein, 95 aa, Thermosynechococcus elongatus
ASVVPQEGQQVTRKHYPNYKVIVLNDDFNTFQHVVACLKKYIPNMISDRAWELTNQVHYGGRAIVWVGPQEQAELYHEQLLRAGLPMAPLEPGGS

SEQ ID NO: 7350 - protein, 95 aa, Thermosynechococcus elongatus
ASVVPQEGQQVTRKHYPNYKVIVLNDDFNTFQHVVACLKKYIPNMISDRAWELTNQVHYGGRAIVWVGPQEQAELYHEQLLRAGLSMAPLEAEGS

SEQ ID NO: 7351 - protein, 95 aa, Thermosynechococcus elongatus; identical to SEQ ID NO: 620

SEQ ID NO: 7352 - protein, 95 aa, Thermosynechococcus elongatus; identical to SEQ ID NO: 1938

SEQ ID NO: 7353 - protein, 95 aa, Thermosynechococcus elongatus; identical to SEQ ID NO: 1

SEQ ID NO: 7354 - protein, 95 aa, Thermosynechococcus elongatus; identical to SEQ ID NO: 429

SEQ ID NO: 7355 - protein, 95 aa, Thermosynechococcus elongatus
ASVVPQEGQQVTRKHYPNYKVIVLNDDFNTFQHVVACLKKYIPNMISDRAWELTNQVHYGGRAIVWVGPQEQAELYHEQLLGAGLTMAPLEPEGS

SEQ ID NO: 7356 - protein, 81 aa, Thermosynechococcus elongatus
ASVVPQEGQQVTRKHYPNYKVIVLNDDFNTFQHVVACLKKYIPNMISDRAWELTNQVHYGGRAIVWVGPQEQAELYHEQLL

SEQ ID NO: 7357 - protein, 81 aa, Thermosynechococcus elongatus; identical to SEQ ID NO: 7356

SEQ ID NO: 7358 - protein, 95 aa, Thermosynechococcus elongatus; identical to SEQ ID NO: 623

SEQ ID NO: 7359 - protein, 95 aa, Thermosynechococcus elongatus
ASVVPQEGQQVTRKHYPNYKVIVLNDDFNTFQHVVACLKKYIPNMISDRAWELTNQVHYGGRAIVWVGPQEQAELYHEHLLRAGLTMAPLEAEGS

SEQ ID NO: 7360 - protein, 95 aa, Thermosynechococcus elongatus; identical to SEQ ID NO: 1

SEQ ID NO: 7361 - protein, 95 aa, Thermosynechococcus elongatus; identical to SEQ ID NO: 623

SEQ ID NO: 7362 - protein, 95 aa, Thermosynechococcus elongatus; identical to SEQ ID NO: 623

SEQ ID NO: 7363 - protein, 95 aa, Thermosynechococcus elongatus
ASVVPQEGQQVTRKHYPNYKVIVLNDDFNTFQHVVACLKKYIPNMISDRAWELTNQVHYGGRAIVWVGPQEQAELYHEPLLRAGLTMAPLEPEGS

SEQ ID NO: 7364 - protein, 95 aa, Thermosynechococcus elongatus
ASVVPQEGQQVTRKHYPNYKVIVLNDDFNTFQHVVACLKKYIPNMISDRAWELTNQVHYGGRAIVWVGPQEQAELYHERLLRAGLTMAPLEPEGS

SEQ ID NO: 7365 - protein, 95 aa, Thermosynechococcus elongatus; identical to SEQ ID NO: 302

SEQ ID NO: 7366 - protein, 78 aa, Thermosynechococcus elongatus
ASVVPQEGQQVTRKHYPNYKVIVLNDDFNTFQHVVACLKKYIPNMISDRAWELTNQVHYGGRAIVWVGPQEQAELYHE

SEQ ID NO: 7367 - protein, 95 aa, Thermosynechococcus elongatus
ASVVPQEGQQVTRKHYPNYKVIVLNDDFNTFQHVVACLKKYIPNMISDRAWELTNQVHYGGRAIVWVGPQEQAELYHVQLLRAGLTMAPLEPEGS

SEQ ID NO: 7368 - protein, 77 aa, Thermosynechococcus elongatus; identical to SEQ ID NO: 239

SEQ ID NO: 7369 - protein, 77 aa, Thermosynechococcus elongatus; identical to SEQ ID NO: 239

SEQ ID NO: 7370 - protein, 95 aa, Thermosynechococcus elongatus; identical to SEQ ID NO: 7292

SEQ ID NO: 7371 - protein, 95 aa, Thermosynechococcus elongatus
ASVVPQEGQQVTRKHYPNYKVIVLNDDFNTFQHVVACLKKYIPNMISDRAWELTNQVHYGGRAIVWVGPQEQAELYQERLLRTGLTMAPLEPEGS

SEQ ID NO: 7372 - protein, 95 aa, Thermosynechococcus elongatus; identical to SEQ ID NO: 1

SEQ ID NO: 7373 - protein, 95 aa, Thermosynechococcus elongatus
ASVVPQEGQQVTRKHYPNYKVIVLNDDFNTFQHVVACLKKYIPNMISDRAWELTNQVHYGGRAIVWVGPQEQAELYPEQVLRAGLTRAPLEPEGS

SEQ ID NO: 7374 - protein, 95 aa, Thermosynechococcus elongatus
ASVVPQEGQQVTRKHYPNYKVIVLNDDFNTFQHVVACLKKYIPNMISDRAWELTNQVHYGGRAIVWVGPQEQAELYPEQLWRAGLTMAPLEPGGS

SEQ ID NO: 7375 - protein, 95 aa, Thermosynechococcus elongatus
ASVVPQEGQQVTRKHYPNYKVIVLNDDFNTFQHVVACLKKYIPNMISDRAWELTNQVHYGGRAIVWVGPQEQAELYPEQLLRAGLTMATLEPEGS

SEQ ID NO: 7376 - protein, 95 aa, Thermosynechococcus elongatus; identical to SEQ ID NO: 430

SEQ ID NO: 7377 - protein, 95 aa, Thermosynechococcus elongatus
ASVVPQEGQQVTRKHYPNYKVIVLNDDFNTFQHVVACLKKYIPNMISDRAWELTNQVHYGGRAIVWVGPQEQAELYPEQLLRAGLTRAPLEPEGS

SEQ ID NO: 7378 - protein, 95 aa, Thermosynechococcus elongatus
ASVVPQEGQQVTRKHYPNYKVIVLNDDFNTFQHVVACLKKYIPNMISDRAWELTNQVHYGGRAIVWVGPQEQAELYREQLLRAGLTMAPLEPEGS

SEQ ID NO: 7379 - protein, 95 aa, Thermosynechococcus elongatus
ASVVPQEGQQVTRKHYPNYKVIVLNDDFNTFQHVVACLKKYIPNMISDRAWELTNQVHYGGRAIVWVGPQEQAELYYEQLLRAGLTMAPLEPEGS

SEQ ID NO: 7380 - protein, 95 aa, Thermosynechococcus elongatus
ASVVPQEGQQVTRKHYPNYKVIVLNDDFNTFQHVVACLKKYIPNMISDRAWELTNQVHYGGRAIVWVGPQEQAELSHEQLLRAGLTMAPLEPEGS

SEQ ID NO: 7381 - protein, 95 aa, Thermosynechococcus elongatus
ASVVPQEGQQVTRKHYPNYKVIVLNDDFNTFQHVVACLKKYIPNMISDRAWELTNQVHYGGRAIVWVGPQEQAELFHEQLLRAGLTMAPLEPEGS

SEQ ID NO: 7382 - protein, 95 aa, Thermosynechococcus elongatus
ASVVPQEGQQVTRKHYPNYKVIVLNDDFNTFQHVVACLKKYIPNMISDRAWELTNQVHYGGRAIVWVGPQEQADLYHEQLLRAGLTMAPLEPEGS

SEQ ID NO: 7383 - protein, 95 aa, Thermosynechococcus elongatus; identical to SEQ ID NO: 1

SEQ ID NO: 7384 - protein, 95 aa, Thermosynechococcus elongatus; identical to SEQ ID NO: 1938

SEQ ID NO: 7385 - protein, 95 aa, Thermosynechococcus elongatus
ASVVPQEGQQVTRKHYPNYKVIVLNDDFNTFQHVVACLKKYIPNMISDRAWELTNQVHYGGRAIVWVGPQEQAVLYHEQLLRAGLTLAPLEPEGS

SEQ ID NO: 7386 - protein, 95 aa, Thermosynechococcus elongatus; identical to SEQ ID NO: 7385

SEQ ID NO: 7387 - protein, 95 aa, Thermosynechococcus elongatus
ASVVPQEGQQVTRKHYPNYKVIVLNDDFNTFQHVVACLKKYIPNMISDRAWELTNQVHYGGRAIVWVGPQEQAVLYHVHLLRAGLTLAPLDPEGS

SEQ ID NO: 7388 - protein, 73 aa, Thermosynechococcus elongatus; identical to SEQ ID NO: 431

SEQ ID NO: 7389 - protein, 95 aa, Thermosynechococcus elongatus
ASVVPQEGQQVTRKHYPNYKVIVLNDDFNTFQHVVACLKKYIPNMISDRAWELTNQVHYGGRAIVWVGPQEQVELYHEQLLRAGLTMAPLEPEGS

SEQ ID NO: 7390 - protein, 95 aa, Thermosynechococcus elongatus
ASVVPQEGQQVTRKHYPNYKVIVLNDDFNTFQHVVACLKKYIPNMISDRAWELTNQVHYGGRAIVWVGPQEHAELYHEQLLRAGLTMAPLEPEGS

SEQ ID NO: 7391 - protein, 95 aa, Thermosynechococcus elongatus
ASVVPQEGQQVTRKHYPNYKVIVLNDDFNTFQHVVACLKKYIPNMISDRAWELTNQVHYGGRAIVWVGPQEHAELYHDQLLRAGLTRAPLEPEGS

SEQ ID NO: 7392 - protein, 95 aa, Thermosynechococcus elongatus
ASVVPQEGQQVTRKHYPNYKVIVLNDDFNTFQHVVACLKKYIPNMISDRAWELTNQVHYGGRAIVWVGPQEHADLYPEQLLRAGLTMAPLEPEGS

SEQ ID NO: 7393 - protein, 95 aa, Thermosynechococcus elongatus
ASVVPQEGQQVTRKHYPNYKVIVLNDDFNTFQHVVACLKKYIPNMISDRAWELTNQVHYGGRAIVWVGPQEPAELYHEQLLRAGLTMAPLEPEGS

SEQ ID NO: 7394 - protein, 95 aa, Thermosynechococcus elongatus
ASVVPQEGQQVTRKHYPNYKVIVLNDDFNTFQHVVACLKKYIPNMISDRAWELTNQVHYGGRAIVWVGPQERAELYHEQLLRAGLTMAPLEPGGS

SEQ ID NO: 7395 - protein, 95 aa, Thermosynechococcus elongatus
ASVVPQEGQQVTRKHYPNYKVIVLNDDFNTFQHVVACLKKYIPNMISDRAWELTNQVHYGGRAIVWVGPQDQAELYHEQLLRAGLTMAPLEPDGS

SEQ ID NO: 7396 - protein, 95 aa, Thermosynechococcus elongatus
ASVVPQEGQQVTRKHYPNYKVIVLNDDFNTFQHVVACLKKYIPNMISDRAWELTNQVHYGGRAIVWVGPQDQAELYHEQLLRAGLTMAPLEPGGS

SEQ ID NO: 7397 - protein, 95 aa, Thermosynechococcus elongatus
ASVVPQEGQQVTRKHYPNYKVIVLNDDFNTFQHVVACLKKYIPNMISDRAWELTNQVHYGGRAIVWVGPQDQAELYHEQLLRTGLTMAPLEPEGS

SEQ ID NO: 7398 - protein, 92 aa, Thermosynechococcus elongatus
ASVVPQEGQQVTRKHYPNYKVIVLNDDFNTFQHVVACLKKYIPNMISDRAWELTNQVHYGGRAIVWVGPQDQAELYHEQLLRAGLTMAPLEP

SEQ ID NO: 7399 - protein, 95 aa, Thermosynechococcus elongatus
ASVVPQEGQQVTRKHYPNYKVIVLNDDFNTFQHVVACLKKYIPNMISDRAWELTNQVHYGGRAIVWVGPQAQAELDHEQLLRAGLTMAPLEPEGS

SEQ ID NO: 7400 - protein, 95 aa, Thermosynechococcus elongatus
ASVVPQEGQQVTRKHYPNYKVIVLNDDFNTFQHVVACLKKYIPNMISDRAWELTNQVHYGGRAIVWVGPQAQAELYHEQLVRAGLTMAPLEPEGS

SEQ ID NO: 7401 - protein, 95 aa, Thermosynechococcus elongatus
ASVVPQEGQQVTRKHYPNYKVIVLNDDFNTFQHVVACLKKYIPNMISDRAWELTNQVHYGGRAIVWVGPQVQAELYHEQLLRAGLTIAPMEPGGS

SEQ ID NO: 7402 - protein, 95 aa, Thermosynechococcus elongatus
ASVVPQEGQQVTRKHYPNYKVIVLNDDFNTFQHVVACLKKYIPNMISDRAWELTNQVHYGGRAIVWVGPQVQAELYHEQLLRAGLTIAPLEPGGS

SEQ ID NO: 7403 - protein, 95 aa, Thermosynechococcus elongatus
ASVVPQEGQQVTRKHYPNYKVIVLNDDFNTFQHVVACLKKYIPNMISDRAWELTNQVHYGGRAIVWVGPQVQAELYHVVLLRAGLTMAPLEPGGS

SEQ ID NO: 7404 - protein, 95 aa, Thermosynechococcus elongatus; identical to SEQ ID NO: 48

SEQ ID NO: 7405 - protein, 70 aa, Thermosynechococcus elongatus; identical to SEQ ID NO: 508

SEQ ID NO: 7406 - protein, 70 aa, Thermosynechococcus elongatus; identical to SEQ ID NO: 508

SEQ ID NO: 7407 - protein, 95 aa, Thermosynechococcus elongatus; identical to SEQ ID NO: 1947

SEQ ID NO: 7408 - protein, 95 aa, Thermosynechococcus elongatus
ASVVPQEGQQVTRKHYPNYKVIVLNDDFNTFQHVVACLKKYIPNMISDRAWELTNQVHYGGRAIVWVGPPEQAELYHEQLLRAGLTMAPLEPEGS

SEQ ID NO: 7409 - protein, 95 aa, Thermosynechococcus elongatus
ASVVPQEGQQVTRKHYPNYKVIVLNDDFNTFQHVVACLKKYIPNMISDRAWELTNQVHYGGRAIVWVGPLEQAVLYHEKLLRAGLTMAPLEPEGS

SEQ ID NO: 7410 - protein, 69 aa, Thermosynechococcus elongatus
ASVVPQEGQQVTRKHYPNYKVIVLNDDFNTFQHVVACLKKYIPNMISDRAWELTNQVHYGGRAIVWVGP

SEQ ID NO: 7411 - protein, 95 aa, Thermosynechococcus elongatus; identical to SEQ ID NO: 1

SEQ ID NO: 7412 - protein, 95 aa, Thermosynechococcus elongatus
ASVVPQEGQQVTRKHYPNYKVIVLNDDFNTFQHVVACLKKYIPNMISDRAWELTNQVHYGGRAIVWVGPQEQAELFHEHLLRAGLTLAPLEPEGS

SEQ ID NO: 7413 - protein, 95 aa, Thermosynechococcus elongatus
ASVVPQEGQQVTRKHYPNYKVIVLNDDFNTFQHVVACLKKYIPNMISDRAWELTNQVHYGGRAIVWVCPPEQAELYHEQLLRAGLTMAPLEPEGS

SEQ ID NO: 7414 - protein, 95 aa, Thermosynechococcus elongatus
ASVVPQEGQQVTRKHYPNYKVIVLNDDFNTFQHVVACLKKYIPNMISDRAWELTNQVHYGGRAIVWFGPQEQAELYHEQLLRAGLTMAPLEPEGS

SEQ ID NO: 7415 - protein, 95 aa, Thermosynechococcus elongatus
ASVVPQEGQQVTRKHYPNYKVIVLNDDFNTFQHVVACLKKYIPNMISDRAWELTNQVHYGGRAIVCVGPQEQAELYNEQLLRAGLTMAPLEPEGS

SEQ ID NO: 7416 - protein, 95 aa, Thermosynechococcus elongatus
ASVVPQEGQQVTRKHYPNYKVIVLNDDFNTFQHVVACLKKYIPNMISDRAWELTNQVHYGGRAIVCVGPQEQAELYHEQLLRAGLTMAPLEPGGS

SEQ ID NO: 7417 - protein, 70 aa, Thermosynechococcus elongatus
ASVVPQEGQQVTRKHYPNYKVIVLNDDFNTFQHVVACLKKYIPNMISDRAWELTNQVHYGGRAIVLVGPQ

SEQ ID NO: 7418 - protein, 95 aa, Thermosynechococcus elongatus; identical to SEQ ID NO: 627

SEQ ID NO: 7419 - protein, 95 aa, Thermosynechococcus elongatus
ASVVPQEGQQVTRKHYPNYKVIVLNDDFNTFQHVVACLKKYIPNMISDRAWELTNQVHYGGRAFVWVGPQEQAEFYHEQLLRAGLTMAPLEPEGS

SEQ ID NO: 7420 - protein, 95 aa, Thermosynechococcus elongatus; identical to SEQ ID NO: 628

SEQ ID NO: 7421 - protein, 95 aa, Thermosynechococcus elongatus
ASVVPQEGQQVTRKHYPNYKVIVLNDDFNTFQHVVACLKKYIPNMISDRAWELTNQVHYGGRSIVWVGPQVQAELYHEQLLRAGLTMAPLEPGGS

SEQ ID NO: 7422 - protein, 95 aa, Thermosynechococcus elongatus
ASVVPQEGQQVTRKHYPNYKVIVLNDDFNTFQHVVACLKKYIPNMISDRAWELTNQVHYGGRSIVWVCPQEQAELYHEQLLRAGLTMAPLEPEGS

SEQ ID NO: 7423 - protein, 95 aa, Thermosynechococcus elongatus
ASVVPQEGQQVTRKHYPNYKVIVLNDDFNTFQHVVACLKKYIPNMISDRAWELTNQVHYGGRAIVWVGPQEQAVLYNDHLLRAGLTMAPLVPEGS

SEQ ID NO: 7424 - protein, 95 aa, Thermosynechococcus elongatus
ASVVPQEGQQVTRKHYPNYKVIVLNDDFNTFQHVVACLKKYIPNMISDRAWELTNQVHYGCRAIVWVGPQEQAELYHEQLLRAGLTMAPLEREGS

SEQ ID NO: 7425 - protein, 95 aa, Thermosynechococcus elongatus
ASVVPQEGQQVTRKHYPNYKVIVLNDDFNTFQHVVACLKKYIPNMISDRAWELTNQVHYGCRAIVWVGPQEQAELYHEQLLRAGLTMAPREPEGS

SEQ ID NO: 7426 - protein, 95 aa, Thermosynechococcus elongatus; identical to SEQ ID NO: 275

SEQ ID NO: 7427 - protein, 95 aa, Thermosynechococcus elongatus; identical to SEQ ID NO: 275

SEQ ID NO: 7428 - protein, 95 aa, Thermosynechococcus elongatus
ASVVPQEGQQVTRKHYPNYKVIVLNDDFNTFQHVVACLKKYIPNMISDRAWELTNQVHYGCRSIVWVGPQEQAELYHEQLLRAGLTMAPLEPEGS

SEQ ID NO: 7429 - protein, 95 aa, Thermosynechococcus elongatus
ASVVPQEGQQVTRKHYPNYKVIVLNDDFNTFQHVVACLKKYIPNMISDRAWELTNQVHYGCRSFVLVGPQEQAELYHEQLLRAGLTMAPLEPEGS

SEQ ID NO: 7430 - protein, 95 aa, Thermosynechococcus elongatus; identical to SEQ ID NO: 1

SEQ ID NO: 7431 - protein, 95 aa, Thermosynechococcus elongatus; identical to SEQ ID NO: 1

SEQ ID NO: 7432 - protein, 92 aa, Thermosynechococcus elongatus
ASVVPQEGQQVTRKHYPNYKVIVLNDDFNTFQHVVACLKKYIPNMISDRAWELTNQVHYVGQAIVWVGPQEQAELYHEQLLRAGLTMAPLEP

SEQ ID NO: 7433 - protein, 95 aa, Thermosynechococcus elongatus; identical to SEQ ID NO: 276

SEQ ID NO: 7434 - protein, 95 aa, Thermosynechococcus elongatus
ASVVPQEGQQVTRKHYPNYKVIVLNDDFNTFQHVVACLKKYIPNMISDRAWELTNQVHYVGLAIVRVGPQVQAELYHEQLLRAGLTMAPLEPEGS

SEQ ID NO: 7435 - protein, 95 aa, Thermosynechococcus elongatus
ASVVPQEGQQVTRKHYPNYKVIVLNDDFNTFQHVVACLKKYIPNMISDRAWELTNQVHYVGLAIVWVGPQEQAELYHEQLLRAGLTMAPMEPEGS

SEQ ID NO: 7436 - protein, 95 aa, Thermosynechococcus elongatus; identical to SEQ ID NO: 822

SEQ ID NO: 7437 - protein, 95 aa, Thermosynechococcus elongatus
ASVVPQEGQQVTRKHYPNYKVIVLNDDFNTFQHVVACLKKYIPNMISDRAWELTNQVHYVGLAIVWVGPQEQAELYHEQLLRAGLTMAPLEPGGS

SEQ ID NO: 7438 - protein, 95 aa, Thermosynechococcus elongatus; identical to SEQ ID NO: 1958

SEQ ID NO: 7439 - protein, 59 aa, Thermosynechococcus elongatus; identical to SEQ ID NO: 373

SEQ ID NO: 7440 - protein, 59 aa, Thermosynechococcus elongatus; identical to SEQ ID NO: 373

SEQ ID NO: 7441 - protein, 59 aa, Thermosynechococcus elongatus; identical to SEQ ID NO: 373

SEQ ID NO: 7442 - protein, 59 aa, Thermosynechococcus elongatus; identical to SEQ ID NO: 373

SEQ ID NO: 7443 - protein, 59 aa, Thermosynechococcus elongatus; identical to SEQ ID NO: 373

SEQ ID NO: 7444 - protein, 59 aa, Thermosynechococcus elongatus; identical to SEQ ID NO: 373

SEQ ID NO: 7445 - protein, 59 aa, Thermosynechococcus elongatus; identical to SEQ ID NO: 373

SEQ ID NO: 7446 - protein, 59 aa, Thermosynechococcus elongatus; identical to SEQ ID NO: 373

SEQ ID NO: 7447 - protein, 59 aa, Thermosynechococcus elongatus; identical to SEQ ID NO: 373

SEQ ID NO: 7448 - protein, 59 aa, Thermosynechococcus elongatus; identical to SEQ ID NO: 373

SEQ ID NO: 7449 - protein, 59 aa, Thermosynechococcus elongatus; identical to SEQ ID NO: 373

SEQ ID NO: 7450 - protein, 58 aa, Thermosynechococcus elongatus; identical to SEQ ID NO: 1126

SEQ ID NO: 7451 - protein, 58 aa, Thermosynechococcus elongatus; identical to SEQ ID NO: 1126

SEQ ID NO: 7452 - protein, 95 aa, Thermosynechococcus elongatus; identical to SEQ ID NO: 49

SEQ ID NO: 7453 - protein, 95 aa, Thermosynechococcus elongatus; identical to SEQ ID NO: 1

SEQ ID NO: 7454 - protein, 95 aa, Thermosynechococcus elongatus
ASVVPQEGQQVTRKHYPNYKVIVLNDDFNTFQHVVACLKKYIPNMISDRAWELTNQVHSGGRAIVWVGPQEQAELYHEQLLRAGLTIAPLEPEGS

SEQ ID NO: 7455 - protein, 95 aa, Thermosynechococcus elongatus
ASVVPQEGQQVTRKHYPNYKVIVLNDDFNTFQHVVACLKKYIPNMISDRAWELTNQVHSGGRAIVWVGPQEQAELYHEQLLRAGLTMAPLEPEGS

SEQ ID NO: 7456 - protein, 95 aa, Thermosynechococcus elongatus
ASVVPQEGQQVTRKHYPNYKVIVLNDDFNTFQHVVACLKKYIPNMISDRAWELTNQVHCGGRAIVWVGPQEQAELYHEQLLRAGLTMAPLEPEGS

SEQ ID NO: 7457 - protein, 95 aa, Thermosynechococcus elongatus
ASVVPQEGQQVTRKHYPNYKVIVLNDDFNTFQHVVACLKKYIPNMISDRAWELTNQVHFEGQAIVWVGPQEQAELYHEQLLRAGLTMAPLEPGGS

SEQ ID NO: 7458 - protein, 95 aa, Thermosynechococcus elongatus
ASVVPQEGQQVTRKHYPNYKVIVLNDDFNTFQHVVACLKKYIPNMISDRAWELTNQVHFEGQAIVWVGPQVLAELYHEQLLRAGLTMAPLEPGGS

SEQ ID NO: 7459 - protein, 95 aa, Thermosynechococcus elongatus; identical to SEQ ID NO: 241

SEQ ID NO: 7460 - protein, 95 aa, Thermosynechococcus elongatus
ASVVPQEGQQVTRKHYPNYKVIVLNDDFNTFQHVVACLKKYIPNMISDRAWELTNQVHFGGRAIVWVGPQEQAVLYHELLLRAGLTMAPLEPEGS

SEQ ID NO: 7461 - protein, 95 aa, Thermosynechococcus elongatus
ASVVPQEGQQVTRKHYPNYKVIVLNDDFNTFQHVVACLKKYIPNMISDRAWELTNQVHFGGRAIVWVGPQDQAELYHEQLLRAGLTRAPLEPEGS

SEQ ID NO: 7462 - protein, 95 aa, Thermosynechococcus elongatus
ASVVPQEGQQVTRKHYPNYKVIVLNDDFNTFQHVVACLKKYIPNMISDRAWELTNQVHFGGRAIVWVGQQEQAELYHEQLLRAGLTIAPLVPEGS

SEQ ID NO: 7463 - protein, 95 aa, Thermosynechococcus elongatus
ASVVPQEGQQVTRKHYPNYKVIVLNDDFNTFQHVVACLKKYIPNMISDRAWELTNQVHFGGRAIVWVGPQEQAELYHEQLVRAGLTMAPLEPEGS

SEQ ID NO: 7464 - protein, 95 aa, Thermosynechococcus elongatus
ASVVPQEGQQVTRKHYPNYKVIVLNDDFNTFQHVVACLKKYIPNMISDRAWELTNQVHFGGRAIVWVGPQEQAELYHEQLLRAGLTRAPLEPEGS

SEQ ID NO: 7465 - protein, 95 aa, Thermosynechococcus elongatus
ASVVPQEGQQVTRKHYPNYKVIVLNDDFNTFQHVVACLKKYIPNMISDRAWELTNQVHFGGRAIVWVGPQEQAELYHEQLLRAGLTMAPLDPEGS

SEQ ID NO: 7466 - protein, 95 aa, Thermosynechococcus elongatus; identical to SEQ ID NO: 241

SEQ ID NO: 7467 - protein, 95 aa, Thermosynechococcus elongatus
ASVVPQEGQQVTRKHYPNYKVIVLNDDFNTFQHVVACLKKYIPNMISDRAWELTNQVHFGGRAIVWVGPQEQAELYHVQLVRAGLTRAPLEPEGS

SEQ ID NO: 7468 - protein, 95 aa, Thermosynechococcus elongatus
ASVVPQEGQQVTRKHYPNYKVIVLNDDFNTFQHVVACLKKYIPNMISDRAWELTNQVHFGGRAIVWVGPQEQAELFHVHLLRAGLSMAPLEPEGS

SEQ ID NO: 7469 - protein, 95 aa, Thermosynechococcus elongatus
ASVVPQEGQQVTRKHYPNYKVIVLNDDFNTFQHVVACLKKYIPNMISDRAWELTNQVHFGGRAIVWVGPQVQAELYHEQLLRAGLTMAPLEPGGS

SEQ ID NO: 7470 - protein, 59 aa, Thermosynechococcus elongatus
ASVVPQEGQQVTRKHYPNYKVIVLNDDFNTFQHVVACLKKYIPNMISDRAWELTNQVHF

SEQ ID NO: 7471 - protein, 95 aa, Thermosynechococcus elongatus; identical to SEQ ID NO: 1

SEQ ID NO: 7472 - protein, 95 aa, Thermosynechococcus elongatus; identical to SEQ ID NO: 1155

SEQ ID NO: 7473 - protein, 95 aa, Thermosynechococcus elongatus; identical to SEQ ID NO: 823

SEQ ID NO: 7474 - protein, 95 aa, Thermosynechococcus elongatus
ASVVPQEGQQVTRKHYPNYKVIVLNDDFNTFQHVVACLKKYIPNMISDRAWELTNQVLYGGRAIVWVGPLEQAELYHEQLLRAGLTIAPLEAEGS

SEQ ID NO: 7475 - protein, 95 aa, Thermosynechococcus elongatus
ASVVPQEGQQVTRKHYPNYKVIVLNDDFNTFQHVVACLKKYIPNMISDRAWELTNQCHYGGRAIVWVGPQEQAELYHEQLLRAGLTMAPLEPEGS

SEQ ID NO: 7476 - protein, 72 aa, Thermosynechococcus elongatus
ASVVPQEGQQVTRKHYPNYKVIVLNDDFNTFQHVVACLKKYIPNMISDRAWELTNQFHYGGRDIVWVGPRTS

SEQ ID NO: 7477 - protein, 95 aa, Thermosynechococcus elongatus
ASVVPQEGQQVTRKHYPNYKVIVLNDDFNTFQHVVACLKKYIPNMISDRAWELTNQFHYGCRAIVWVGPQEQAVLYHEQLLRAGLTMAPLEPEGS

SEQ ID NO: 7478 - protein, 95 aa, Thermosynechococcus elongatus; identical to SEQ ID NO: 630

SEQ ID NO: 7479 - protein, 95 aa, Thermosynechococcus elongatus; identical to SEQ ID NO: 630

SEQ ID NO: 7480 - protein, 95 aa, Thermosynechococcus elongatus; identical to SEQ ID NO: 630

SEQ ID NO: 7481 - protein, 95 aa, Thermosynechococcus elongatus
ASVVPQEGQQVTRKHYPNYKVIVLNDDFNTFQHVVACLKKYIPNMISDRAWELTNHVHYGGRAIVWDGPQEQAELYHEQLLRAGLTMAPLEPEGS

SEQ ID NO: 7482 - protein, 95 aa, Thermosynechococcus elongatus
ASVVPQEGQQVTRKHYPNYKVIVLNDDFNTFQHVVACLKKYIPNMISDRAWELTNHVHYGGRAIVWVGPQEQAELYHEQLLRAGLTMAPLEPGGS

SEQ ID NO: 7483 - protein, 95 aa, Thermosynechococcus elongatus
ASVVPQEGQQVTRKHYPNYKVIVLNDDFNTFQHVVACLKKYIPNMISDRAWELTNHVHYGGRAIVWVGPQEQAVLYHEQLLRAGLTMAPLEPEGS

SEQ ID NO: 7484 - protein, 95 aa, Thermosynechococcus elongatus
ASVVPQEGQQVTRKHYPNYKVIVLNDDFNTFQHVVACLKKYIPNMISDRAWELTNHVHYGGRAIVWVGPQDQAELYHEQLLRAGLTWAPLEPEGS

SEQ ID NO: 7485 - protein, 70 aa, Thermosynechococcus elongatus
ASVVPQEGQQVTRKHYPNYKVIVLNDDFNTFQHVVACLKKYIPNMISDRAWELTNHVHYGGRAIVWVGPQ

SEQ ID NO: 7486 - protein, 95 aa, Thermosynechococcus elongatus
ASVVPQEGQQVTRKHYPNYKVIVLNDDFNTFQHVVACLKKYIPNMISDRAWELTNHVHYGGRAFVWVGPQEQAELYHEHLLRAGLTMAPLEPEGS

SEQ ID NO: 7487 - protein, 95 aa, Thermosynechococcus elongatus
ASVVPQEGQQVTRKHYPNYKVIVLNDDFNTFQHVVACLKKYIPNMISDRAWELTNPVHNGGRAIVWVGPQEQAELYPEQLMRAGLTMAPLEPEGS

SEQ ID NO: 7488 - protein, 95 aa, Thermosynechococcus elongatus
ASVVPQEGQQVTRKHYPNYKVIVLNDDFNTFQHVVACLKKYIPNMISDRAWELTNPVHYGGRAIVWVGPQEQAELYHEQLLRAGLTMAPLEPEGS

SEQ ID NO: 7489 - protein, 95 aa, Thermosynechococcus elongatus
ASVVPQEGQQVTRKHYPNYKVIVLNDDFNTFQHVVACLKKYIPNMISDRAWELTNPVHYGGRAIVWVGPQEQAELYHEQLLRAGLTMAPLEPGGS

SEQ ID NO: 7490 - protein, 95 aa, Thermosynechococcus elongatus
ASVVPQEGQQVTRKHYPNYKVIVLNDDFNTFQHVVACLKKYIPNMISDRAWELTNLVHYGGRAIVWVGPQEQAELYHEQLLRAGLTMAPLEPEGS

SEQ ID NO: 7491 - protein, 95 aa, Thermosynechococcus elongatus; identical to SEQ ID NO: 7490

SEQ ID NO: 7492 - protein, 95 aa, Thermosynechococcus elongatus
ASVVPQEGQQVTRKHYPNYKVIVLNDDFNTFQHVVACLKKYIPNMISDRAWELTNEVHYGGRAIVWVGPQEQAELYHEQLLRAGLTMATLEPEGS

SEQ ID NO: 7493 - protein, 55 aa, Thermosynechococcus elongatus; identical to SEQ ID NO: 824

SEQ ID NO: 7494 - protein, 55 aa, Thermosynechococcus elongatus; identical to SEQ ID NO: 824

SEQ ID NO: 7495 - protein, 55 aa, Thermosynechococcus elongatus; identical to SEQ ID NO: 824

SEQ ID NO: 7496 - protein, 95 aa, Thermosynechococcus elongatus
ASVVPQEGQQVTRKHYPNYKVIVLNDDFNTFQHVVACLKKYIPNMISDRAWELTNQVHYKGQATVWVGPQKQAELYHEQLLRAGLTMAPLEPEGS

SEQ ID NO: 7497 - protein, 95 aa, Thermosynechococcus elongatus
ASVVPQEGQQVTRKHYPNYKVIVLNDDFNTFQHVVACLKKYIPNMISDRAWELTTQVHYGGRAIVWVGPQEQAELYHEQLLRAGLTMAPLEPEGS

SEQ ID NO: 7498 - protein, 95 aa, Thermosynechococcus elongatus
ASVVPQEGQQVTRKHYPNYKVIVLNDDFNTFQHVVACLKKYIPNMISDRAWELTSQVHYGGRAIVWVGPQEQAELYHEQLLRAGLTMAPLEPEGS

SEQ ID NO: 7499 - protein, 61 aa, Thermosynechococcus elongatus
ASVVPQEGQQVTRKHYPNYKVIVLNDDFNTFQHVVACLKKYIPNMISDRAWELTSQVHYGG

SEQ ID NO: 7500 - protein, 95 aa, Thermosynechococcus elongatus
ASVVPQEGQQVTRKHYPNYKVIVLNDDFNTFQHVVACLKKYIPNMISDRAWELTIQDHYGGRAIVWVGPQEQAELYQEQLLRAGLTMAPLEPEGS

SEQ ID NO: 7501 - protein, 95 aa, Thermosynechococcus elongatus; identical to SEQ ID NO: 1158

SEQ ID NO: 7502 - protein, 95 aa, Thermosynechococcus elongatus
ASVVPQEGQQVTRKHYPNYKVIVLNDDFNTFQHVVACLKKYIPNMISDRAWELSNQVHYGGRAIVWVGPQEQAELYHEQLLRAGLTMAPLEPEGS

SEQ ID NO: 7503 - protein, 95 aa, Thermosynechococcus elongatus
ASVVPQEGQQVTRKHYPNYKVIVLNDDFNTFQHVVACLKKYIPNMISDRAWEFTNQVHYKGQAIVWVGPQEQAELNHEQLLRAGLTMAPLEPEGS

SEQ ID NO: 7504 - protein, 95 aa, Thermosynechococcus elongatus
ASVVPQEGQQVTRKHYPNYKVIVLNDDFNTFQHVVACLKKYIPNMISDRAWEFTNQVHYEGQAIVWVGPQEQAELYHEQLLRAGLTMAPLEPEGS

SEQ ID NO: 7505 - protein, 95 aa, Thermosynechococcus elongatus
ASVVPQEGQQVTRKHYPNYKVIVLNDDFNTFQHVVACLKKYIPNMISDRAWDLTNQVHYGGRAIVWVGPQEQAELNHEQLLRAGLTMAPLEPEGS

SEQ ID NO: 7506 - protein, 75 aa, Thermosynechococcus elongatus
ASVVPQEGQQVTRKHYPNYKVIVLNDDFNTFQHVVACLKKYIPNMISDRAWDLTNQVHYGGRAIVWVGPQEQAEL

SEQ ID NO: 7507 - protein, 95 aa, Thermosynechococcus elongatus
ASVVPQEGQQVTRKHYPNYKVIVLNDDFNTFQHVVACLKKYIPNMISDRAWDLTNQVHYGGRAIVWVGPQEQAELYHEQLLRAGLTRAPLEPEGS

SEQ ID NO: 7508 - protein, 95 aa, Thermosynechococcus elongatus; identical to SEQ ID NO: 633

SEQ ID NO: 7509 - protein, 95 aa, Thermosynechococcus elongatus
ASVVPQEGQQVTRKHYPNYKVIVLNDDFNTFQHVVACLKKYIPNMISDRAWDLTNQVHYGGRAIVWVGPQEQAELYHEQLLRAGLTMAPLEPGGS

SEQ ID NO: 7510 - protein, 95 aa, Thermosynechococcus elongatus
ASVVPQEGQQVTRKHYPNYKVIVLNDDFNTFQHVVACLKKYIPNMISDRAWDLTNQVHYGGRAIVWVGPQEQAELYLELLLRAGLTMAPLEPEGS

SEQ ID NO: 7511 - protein, 95 aa, Thermosynechococcus elongatus
ASVVPQEGQQVTRKHYPNYKVIVLNDDFNTFQHVVACLKKYIPNMISDRAWDLTNQVHFGGRAIVWVGPQEQAELYHEQLLRAGLTRAPLEPEGS

SEQ ID NO: 7512 - protein, 95 aa, Thermosynechococcus elongatus
ASVVPQEGQQVTRKHYPNYKVIVLNDDFNTFQHVVACLKKYIPNMISDRAWDLTNQVHYDGQAMFWVGPQEQAELYHEHWFSAGLTMAPLEPEGS

SEQ ID NO: 7513 - protein, 95 aa, Thermosynechococcus elongatus
ASVVPQEGQQVTRKHYPNYKVIVLNDDFNTFQHVVACLKKYIPNMISDRAWDLTNHVHYGVRAIVWVGPKEKAELYHEHLLRAGLTLAQLEPDGS

SEQ ID NO: 7514 - protein, 95 aa, Thermosynechococcus elongatus
ASVVPQEGQQVTRKHYPNYKVIVLNDDFNTFQHVVACLKKYIPNMISDRAWVLTNQVHYEGQAIVWVGPQEQAELYHEQLLRAGLTMAPLEPEGS

SEQ ID NO: 7515 - protein, 51 aa, Thermosynechococcus elongatus; identical to SEQ ID NO: 1160

SEQ ID NO: 7516 - protein, 51 aa, Thermosynechococcus elongatus; identical to SEQ ID NO: 1160

SEQ ID NO: 7517 - protein, 95 aa, Thermosynechococcus elongatus
ASVVPQEGQQVTRKHYPNYKVIVLNDDFNTFQHVVACLKKYIPNMISDRACELTNQLHYGGRAIVWVGPQEQAELYHEQLLRAGLTMAPLEPEGS

SEQ ID NO: 7518 - protein, 95 aa, Thermosynechococcus elongatus
ASVVPQEGQQVTRKHYPNYKVIVLNDDFNTFQHVVACLKKYIPNMISDRACELTNQVHYEGQAIVWVGPQVQAELYHEQLLRAGLTMAPLEPGGS

SEQ ID NO: 7519 - protein, 95 aa, Thermosynechococcus elongatus; identical to SEQ ID NO: 304

SEQ ID NO: 7520 - protein, 95 aa, Thermosynechococcus elongatus
ASVVPQEGQQVTRKHYPNYKVIVLNDDFNTFQHVVACLKKYIPNMISDRACELTNQVHYGGRAIVWVGPQEQAELNHEQLLRAGLTMAPLEPEGS

SEQ ID NO: 7521 - protein, 95 aa, Thermosynechococcus elongatus
ASVVPQEGQQVTRKHYPNYKVIVLNDDFNTFQHVVACLKKYIPNMISDRACELTNQVHYGGRAIVCVGPQEQAELYHEQLLRAGLTMAPLEPEGS

SEQ ID NO: 7522 - protein, 95 aa, Thermosynechococcus elongatus
ASVVPQEGQQVTRKHYPNYKVIVLNDDFNTFQHVVACLKKYIPNMISDRACELTNQVLYGGRAIVWVGPQEQAELYHEQLLRAGLTMATLEPEGS

SEQ ID NO: 7523 - protein, 95 aa, Thermosynechococcus elongatus; identical to SEQ ID NO: 305

SEQ ID NO: 7524 - protein, 95 aa, Thermosynechococcus elongatus
ASVVPQEGQQVTRKHYPNYKVIVLNDDFNTFQHVVACLKKYIPNMISDRALELTNQVHYGGLAIVWVGPQEQAELYHEQLLRAGLTMAPLEPEGS

SEQ ID NO: 7525 - protein, 95 aa, Thermosynechococcus elongatus
ASVVPQEGQQVTRKHYPNYKVIVLNDDFNTFQHVVACLKKYIPNMISDRALELTNQVHYVGRAIVCVGPQEQAELYHEQLLRAGLTMAPLEPEGS

SEQ ID NO: 7526 - protein, 95 aa, Thermosynechococcus elongatus
ASVVPQEGQQVTRKHYPNYKVIVLNDDFNTFQHVVACLKKYIPNMISDRGWELTNQVHYGGRAIVWVGPQEQAELYHEQLLRAGLTMAPLEPEGS

SEQ ID NO: 7527 - protein, 95 aa, Thermosynechococcus elongatus
ASVVPQEGQQVTRKHYPNYKVIVLNDDFNTFQHVVACLKKYIPNMISDRSWELTNQVHYEGQAIVWVGPQEQAELYHEQLLRTGLTMAPLEPEGS

SEQ ID NO: 7528 - protein, 95 aa, Thermosynechococcus elongatus
ASVVPQEGQQVTRKHYPNYKVIVLNDDFNTFQHVVACLKKYIPNMISDIAWELTNQVHYGGRAIVCVGPQEQAELYHEQLLRAGLTMAPLEPEGS

SEQ ID NO: 7529 - protein, 95 aa, Thermosynechococcus elongatus; identical to SEQ ID NO: 1

SEQ ID NO: 7530 - protein, 95 aa, Thermosynechococcus elongatus
ASVVPQEGQQVTRKHYPNYKVIVLNDDFNTFQHVVACLKKYIPNMISDGAWELTNQVHYGGRAIVWVGPQEQAELYHEQLLRAGLTMAPLEPEGS

SEQ ID NO: 7531 - protein, 48 aa, Thermosynechococcus elongatus
ASVVPQEGQQVTRKHYPNYKVIVLNDDFNTFQHVVACLKKYIPNMISD

SEQ ID NO: 7532 - protein, 95 aa, Thermosynechococcus elongatus; identical to SEQ ID NO: 1

SEQ ID NO: 7533 - protein, 95 aa, Thermosynechococcus elongatus
ASVVPQEGQQVTRKHYPNYKVIVLNDDFNTFQHVVACLKKYIPNMISGRAWELTNQVHYGGRAIVWVGPQEQAELYHEQLLRAGLTMAPLEPEGS

SEQ ID NO: 7534 - protein, 95 aa, Thermosynechococcus elongatus; identical to SEQ ID NO: 7533

SEQ ID NO: 7535 - protein, 95 aa, Thermosynechococcus elongatus; identical to SEQ ID NO: 825

SEQ ID NO: 7536 - protein, 95 aa, Thermosynechococcus elongatus
ASVVPQEGQQVTRKHYPNYKVIVLNDDFNTFQHVVACLKKYIPNMVSDRAWELTNQVHYGGRAIVWVGPQEHAELYHEQLLRAGLTMAPLEPEGS

SEQ ID NO: 7537 - protein, 95 aa, Thermosynechococcus elongatus
ASVVPQEGQQVTRKHYPNYKVIVLNDDFNTFQHVVACLKKYIPNLISDRAWELTNQVHYGGRAIVWVGPQEQAELYHEQLLRAGLTMAPLEPEGS

SEQ ID NO: 7538 - protein, 95 aa, Thermosynechococcus elongatus
ASVVPQEGQQVTRKHYPNYKVIVLNDDFNTFQHVVACLKKYIPNVISDRAWELTNQVHYGGRAIVWVGPQEQAELYHEQLLRAGLTMAPLEPEGS

SEQ ID NO: 7539 - protein, 95 aa, Thermosynechococcus elongatus
ASVVPQEGQQVTRKHYPNYKVIVLNDDFNTFQHVVACLKKYIPKMISDRAWELTNQVHYGGRAIVWVGPLEQAELYHEHLLRAGLTMAPLDPEGS

SEQ ID NO: 7540 - protein, 80 aa, Thermosynechococcus elongatus
ASVVPQEGQQVTRKHYPNYKVIVLNDDFNTFQHVVACLKKYIPNMTSDRAWELTNQVHYKGQAIVWVGPQEQAELNHEQL

SEQ ID NO: 7541 - protein, 95 aa, Thermosynechococcus elongatus; identical to SEQ ID NO: 7116

SEQ ID NO: 7542 - protein, 95 aa, Thermosynechococcus elongatus; identical to SEQ ID NO: 7116

SEQ ID NO: 7543 - protein, 70 aa, Thermosynechococcus elongatus
ASVVPQEGQQVTRKHYPNYKVIVLNDDFNTFQHVVACLKKYIPNMTSDRAWELTNQVHYKGQAIVWVGPQ

SEQ ID NO: 7544 - protein, 95 aa, Thermosynechococcus elongatus
ASVVPQEGQQVTRKHYPNYKVIVLNDDFNTFQHVVACLKKYIPNMTSDRAWELTNQVHYKGLAIVWVGPQEQAELYHEQLLRAGLTMAPLEPEGS

SEQ ID NO: 7545 - protein, 95 aa, Thermosynechococcus elongatus
ASVVPQEGQQVTRKHYPNYKVIVLNDDFNTFQHVVACLKKYIPNMTSDRAWELTNQVHYNGRAIVWVGPQEQAELYHEQLLRAGLTMAPLEPEGS

SEQ ID NO: 7546 - protein, 95 aa, Thermosynechococcus elongatus
ASVVPQEGQQVTRKHYPNYKVIVLNDDFNTFQHVVACLKKYIPNMTSDRAWELTNQVHYTGQAIVWVGPQEQAELNHEQLLRAGLTMAPLEPEGS

SEQ ID NO: 7547 - protein, 95 aa, Thermosynechococcus elongatus; identical to SEQ ID NO: 791

SEQ ID NO: 7548 - protein, 95 aa, Thermosynechococcus elongatus; identical to SEQ ID NO: 69

SEQ ID NO: 7549 - protein, 95 aa, Thermosynechococcus elongatus
ASVVPQEGQQVTRKHYPNYKVIVLNDDFNTFQHVVACLKKYIPNMTSDRAWELTNQVHYGGRAIVWVGPQEQAELYHEQLLRAGLTMAPLEPGGS

SEQ ID NO: 7550 - protein, 95 aa, Thermosynechococcus elongatus; identical to SEQ ID NO: 255

SEQ ID NO: 7551 - protein, 95 aa, Thermosynechococcus elongatus
ASVVPQEGQQVTRKHYPNYKVIVLNDDFNTFQHVVACLKKYIPTMISDRAWELTNQVHYEGQAIVWVGPQEQAELYHEQLLRAGLTMAPLEPEGS

SEQ ID NO: 7552 - protein, 95 aa, Thermosynechococcus elongatus; identical to SEQ ID NO: 1164

SEQ ID NO: 7553 - protein, 95 aa, Thermosynechococcus elongatus
ASVVPQEGQQVTRKHYPNYKVIVLNDDFNTFQHVVACLKKYIPHMISDRAWELTNQVHYEGQAIVWVGPQVQAELYHEQLLRAGLTMAPLEPGGS

SEQ ID NO: 7554 - protein, 95 aa, Thermosynechococcus elongatus
ASVVPQEGQQVTRKHYPNYKVIVLNDDFNTFQHVVACLKKYIPHMISDRAWELTNQVHYGGRAIVWVGPQEQAELNHEQLLRAGLTMAPLEPEGS

SEQ ID NO: 7555 - protein, 95 aa, Thermosynechococcus elongatus
ASVVPQEGQQVTRKHYPNYKVIVLNDDFNTFQHVVACLKKYIPHMISDRAWELTNQVHYGGRAIVWVGPQEQAELYHEQVLRAGLTMAPLEPEGS

SEQ ID NO: 7556 - protein, 95 aa, Thermosynechococcus elongatus
ASVVPQEGQQVTRKHYPNYKVIVLNDDFNTFQHVVACLKKYIPHMISDRAWELTNQVHYGGRAIVWVGPQEQAELYHEQLLRAGLTMAPLEPEGS

SEQ ID NO: 7557 - protein, 95 aa, Thermosynechococcus elongatus; identical to SEQ ID NO: 259

SEQ ID NO: 7558 - protein, 95 aa, Thermosynechococcus elongatus
ASVVPQEGQQVTRKHYPNYKVIVLNDDFNTFQHVVACLKKYIANMISDRAWELTNQVHYGGRAIVWVGPQEQAELYHEQLLRAGLTMAPLDPEGS

SEQ ID NO: 7559 - protein, 95 aa, Thermosynechococcus elongatus
ASVVPQEGQQVTRKHYPNYKVIVLNDDFNTFQHVVACLKKYIANMISDRAWELTNQVHFGCRAIVWVGPQEQAELYHEQLLRAGLTMAPLEPEGS

SEQ ID NO: 7560 - protein, 95 aa, Thermosynechococcus elongatus
ASVVPQEGQQVTRKHYPNYKVIVLNDDFNTFQHVVACLKKYMPNMISDRAWELTNQVHYKGQAIVWVGPQEQAELNHEQLLRAGLTMAPLEPEGS

SEQ ID NO: 7561 - protein, 95 aa, Thermosynechococcus elongatus
ASVVPQEGQQVTRKHYPNYKVIVLNDDFNTFQHVVACLKKYMPNMISDRAWELTNQVHYGGRAIVWVGPQEQAELYHEQLLRAGLTMAPLEPEGS

SEQ ID NO: 7562 - protein, 95 aa, Thermosynechococcus elongatus; identical to SEQ ID NO: 1

SEQ ID NO: 7563 - protein, 95 aa, Thermosynechococcus elongatus
ASVVPQEGQQVTRKHYPNYKVIVLNDDFNTFQHVVACLKKYLPNMISDRAWELTNQVHYGGRAIVWVGPQEQAELYHEQLLRAGLTMAPLEPEGS

SEQ ID NO: 7564 - protein, 95 aa, Thermosynechococcus elongatus
ASVVPQEGQQVTRKHYPNYKVIVLNDDFNTFQHVVACLKKYLPTMISDRAWELTNQGHYGGRAIVWVGPQEQAELYHEQLLRAGLTMAPLEPEGS

SEQ ID NO: 7565 - protein, 95 aa, Thermosynechococcus elongatus
ASVVPQEGQQVTRKHYPNYKVIVLNDDFNTFQHVVACLKKYVPNMISDIAWELANQVHYGGRAIVWVGPQEQAELYHEQLLRAGLTMAPLEPEGS

SEQ ID NO: 7566 - protein, 95 aa, Thermosynechococcus elongatus
ASVVPQEGQQVTRKHYPNYKVIVLNDDFNTFQHVVACLKKYFPNMISDRAWELTNQVHYGGRAIVWVGPQEQAELYHEQLLRAGLTRAPLEPGGS

SEQ ID NO: 7567 - protein, 95 aa, Thermosynechococcus elongatus
ASVVPQEGQQVTRKHYPNYKVIVLNDDFNTFQHVVACLKKYFPNMISDRAWELTNQVHYGGRAIVWVGPQEQAELYHEQLLRAGLTMAPLEPEGS

SEQ ID NO: 7568 - protein, 95 aa, Thermosynechococcus elongatus
ASVVPQEGQQVTRKHYPNYKVIVLNDDFNTFQHVVACLKKCIPNMISDRAWELTNQVHYGGRAIVWVGPQEQAELYHEQLLRAGLTMAPLEPEGS

SEQ ID NO: 7569 - protein, 95 aa, Thermosynechococcus elongatus
ASVVPQEGQQVTRKHYPNYKVIVLNDDFNTFQHVVACLKRYIPNMISDRAWELTNQVHYGGRAIVWVGPQEQAELYHEQLLRAGLTMAPLEPEGS

SEQ ID NO: 7570 - protein, 39 aa, Thermosynechococcus elongatus
ASVVPQEGQQVTRKHYPNYKVIVLNDDFNTFQHVVACLK

SEQ ID NO: 7571 - protein, 39 aa, Thermosynechococcus elongatus; identical to SEQ ID NO: 7570

SEQ ID NO: 7572 - protein, 95 aa, Thermosynechococcus elongatus
ASVVPQEGQQVTRKHYPNYKVIVLNDDFNTFQHVVACLNKYIPNMISDRAWELTNQVHYGGRAIVWVGPQEQAELYHEQLLRAGLTMAPLEPGGS

SEQ ID NO: 7573 - protein, 95 aa, Thermosynechococcus elongatus
ASVVPQEGQQVTRKHYPNYKVIVLNDDFNTFQHVVACLNKYIPNMISDRAWELTNQVHYGGRAIVWVGPQEQAELYHEQLLRAGLTMVPLEPEGS

SEQ ID NO: 7574 - protein, 95 aa, Thermosynechococcus elongatus
ASVVPQEGQQVTRKHYPNYKVIVLNDDFNTFQHVVACLRKYIPNMISDRAWELTNQVHYGGRAIVWVGPQEQAELYHEQLLRAGLTMAPLEPEGS

SEQ ID NO: 7575 - protein, 40 aa, Thermosynechococcus elongatus
ASVVPQEGQQVTRKHYPNYKVIVLNDDFNTFQHVVACLMK

SEQ ID NO: 7576 - protein, 95 aa, Thermosynechococcus elongatus
ASVVPQEGQQVTRKHYPNYKVIVLNDDFNTFQHVVACLMKYITNMTSDRAWELTNQVHYEGQAIVWVGPQVQAELYHEQLLRAGLTMAPLEPGGS

SEQ ID NO: 7577 - protein, 95 aa, Thermosynechococcus elongatus
ASVVPQEGQQVTRKHYPNYKVIVLNDDFNTFQHVVACLMKYIPNKNSDRAWELTNQVHYEGLAIVWVGPQEQAELYHEQLLRAGLTMAPLEPEGS

SEQ ID NO: 7578 - protein, 95 aa, Thermosynechococcus elongatus
ASVVPQEGQQVTRKHYPNYKVIVLNDDFNTFQHVVACLMKYIPNKTSDRAWELTNKVHYEGQAIVWVGPQEQAELYHEQLLRAGLTMAPLEPEGS

SEQ ID NO: 7579 - protein, 95 aa, Thermosynechococcus elongatus
ASVVPQEGQQVTRKHYPNYKVIVLNDDFNTFQHVVACLMKYIPNKTSDRAWELTNQVHYKGQAIVWVGPQEQAELNHEQLLRAGLTMAPLEPEGS

SEQ ID NO: 7580 - protein, 95 aa, Thermosynechococcus elongatus
ASVVPQEGQQVTRKHYPNYKVIVLNDDFNTFQHVVACLMKYIPNKTSDRAWELTNQVHYKGQAIVWVGPQVQAELYHEQLLRAGLTMAPLEPGGS

SEQ ID NO: 7581 - protein, 95 aa, Thermosynechococcus elongatus; identical to SEQ ID NO: 134

SEQ ID NO: 7582 - protein, 95 aa, Thermosynechococcus elongatus; identical to SEQ ID NO: 134

SEQ ID NO: 7583 - protein, 95 aa, Thermosynechococcus elongatus
ASVVPQEGQQVTRKHYPNYKVIVLNDDFNTFQHVVACLMKYIPNKTSDRAWELTNQVHYEGQAIVWVGPQEQAELYHEQLLRAGLTMATLEPEGS

SEQ ID NO: 7584 - protein, 95 aa, Thermosynechococcus elongatus
ASVVPQEGQQVTRKHYPNYKVIVLNDDFNTFQHVVACLMKYIPNKTSDRAWELTNQVHYEGQAIVWVGPQVQAELYHEQLLRAGLTMAPLEPGGS

SEQ ID NO: 7585 - protein, 95 aa, Thermosynechococcus elongatus
ASVVPQEGQQVTRKHYPNYKVIVLNDDFNTFQHVVACLMKYIPNKTSDRAWELTNQVHYEGLAIVWVGPQEQAELYHEQLLRAGLTMAPLEPEGS

SEQ ID NO: 7586 - protein, 95 aa, Thermosynechococcus elongatus
ASVVPQEGQQVTRKHYPNYKVIVLNDDFNTFQHVVACLMKYIPNMNSDRAWELTNQVHYVGLAIVWVGPQEQAELYHEQLLRAGLTMAPLEPEGS

SEQ ID NO: 7587 - protein, 95 aa, Thermosynechococcus elongatus; identical to SEQ ID NO: 70

SEQ ID NO: 7588 - protein, 95 aa, Thermosynechococcus elongatus
ASVVPQEGQQVTRKHYPNYKVIVLNDDFNTFQHVVACLMKYIPNMTSDRAWELTNQVHYEGQAIVWVGPQEQTELYHEQLLRAGLTMAPLEPEGS

SEQ ID NO: 7589 - protein, 95 aa, Thermosynechococcus elongatus
ASVVPQEGQQVTRKHYPNYKVIVLNDDFNTFQHVVACLMKYIPNMTSDRAWELTNQVHYEGQAIVWVGPQEQAELNHEQLLRAGLTMAPLEPEGS

SEQ ID NO: 7590 - protein, 95 aa, Thermosynechococcus elongatus
ASVVPQEGQQVTRKHYPNYKVIVLNDDFNTFQHVVACLMKYIPNMTSDRAWELTNQVHYEGQAIVWVGPQEQAELYHEQLLRTGLTMAPLEPEGS

SEQ ID NO: 7591 - protein, 95 aa, Thermosynechococcus elongatus
ASVVPQEGQQVTRKHYPNYKVIVLNDDFNTFQHVVACLMKYIPNMTSDRAWELTNQVHYEGQAIVWVGPQEQAELYHEQLLRAGLTRAPLEPEGS

SEQ ID NO: 7592 - protein, 95 aa, Thermosynechococcus elongatus; identical to SEQ ID NO: 70

SEQ ID NO: 7593 - protein, 95 aa, Thermosynechococcus elongatus; identical to SEQ ID NO: 1973

SEQ ID NO: 7594 - protein, 92 aa, Thermosynechococcus elongatus
ASVVPQEGQQVTRKHYPNYKVIVLNDDFNTFQHVVACLMKYIPNMTSDRAWELTNQVHYEGQAIVWVGPREQAELYHEQLLRVGLTMAPLEP

SEQ ID NO: 7595 - protein, 95 aa, Thermosynechococcus elongatus
ASVVPQEGQQVTRKHYPNYKVIVLNDDFNTFQHVVACLMKYIPNMTSDRAWELTNQVHYGGRAIVWVGPQEQAELYHEQLLRAGLTMDPLEPEGS

SEQ ID NO: 7596 - protein, 95 aa, Thermosynechococcus elongatus
ASVVPQEGQQVTRKHYPNYKVIVLNDDFNTFQHVVACLMKYIPNMTSDRAWELTNQVHYVGQAIVWVGPQVQAELYHEQLLRAGLTMAPLEPGGS

SEQ ID NO: 7597 - protein, 95 aa, Thermosynechococcus elongatus
ASVVPQEGQQVTRKHYPNYKVIVLNDDFNTFQHVVACLMKYIPNMTSDRAWELTNQVHYVGLAIVWVGPQVQAELYHEQLLRAGLTMAPLEPGGS

SEQ ID NO: 7598 - protein, 95 aa, Thermosynechococcus elongatus
ASVVPQEGQQVTRKHYPNYKVIVLNDDFNTFQHVVACLMKYIPNMTSDRAWELTNHVHYEGQAFVWVGPQEQAELYHEQLLRTGLTMAPLEPEGS

SEQ ID NO: 7599 - protein, 95 aa, Thermosynechococcus elongatus
ASVVPQEGQQVTRKHYPNYKVIVLNDDFNTFQHVVACLMKYIPNMTSDRAWELTNQVHYKGQAIVWVGPQEQAELNHEQLLRAGLTIAPLEPEGS

SEQ ID NO: 7600 - protein, 95 aa, Thermosynechococcus elongatus
ASVVPQEGQQVTRKHYPNYKVIVLNDDFNTFQHVVACLMKYIPNMTSDRAWELTNQVHYKGQAIVWVGPQEQAELNHEQLLRAGLTMTPLEPEGS

SEQ ID NO: 7601 - protein, 95 aa, Thermosynechococcus elongatus
ASVVPQEGQQVTRKHYPNYKVIVLNDDFNTFQHVVACLMKYIPNMTSDRAWELTNQVHYKGQAIVWVGPQEQAELYHEQLLRAGLTMAPLEPEGS

SEQ ID NO: 7602 - protein, 95 aa, Thermosynechococcus elongatus; identical to SEQ ID NO: 1167

SEQ ID NO: 7603 - protein, 95 aa, Thermosynechococcus elongatus; identical to SEQ ID NO: 92

SEQ ID NO: 7604 - protein, 95 aa, Thermosynechococcus elongatus; identical to SEQ ID NO: 636

SEQ ID NO: 7605 - protein, 95 aa, Thermosynechococcus elongatus
ASVVPQEGQQVTRKHYPNYKVIVLNDDFNTFQHVVACLMKYIPNMTSDRAWELTNQVHYLGLAIVWVGPQEQAELNHEQLLRAGLTMAPLEPEGS

SEQ ID NO: 7606 - protein, 95 aa, Thermosynechococcus elongatus
ASVVPQEGQQVTRKHYPNYKVIVLNDDFNTFQHVVACLMKYVPNKTSDRAWELTNQVHYEGQAIVWVGPQEQAELYHEQLLRAGLTMAPLEPEGS

SEQ ID NO: 7607 - protein, 95 aa, Thermosynechococcus elongatus
ASVVPQEGQQVTRKHYPNYKVIVLNDDFNTFQHVVACFKKYIPNMISDRAWELTNQVHYGGRAIVWVGPQVQAELYHEQLLRAGLTMAPLEPEGS

SEQ ID NO: 7608 - protein, 95 aa, Thermosynechococcus elongatus
ASVVPQEGQQVTRKHYPNYKVIVLNDDFNTFQHVVAWLKKYIPNMISDRAWELTNQVHYEGQAIVCVGPQEQAELYHEQLLRAGLTMAPLEPEGS

SEQ ID NO: 7609 - protein, 95 aa, Thermosynechococcus elongatus
ASVVPQEGQQVTRKHYPNYKVIVLNDDFNTFQHVVAWLKKYIPNMISDRAWELTNQVHYGGRAIVWVGPQEQAELDHEQLLRAGLTMAPLEPEGS

SEQ ID NO: 7610 - protein, 95 aa, Thermosynechococcus elongatus
ASVVPQEGQQVTRKHYPNYKVIVLNDDFNTFQHVVAFLKKYIPNMISDRAWELTNQVHYGGRAIVWVGPQEQAELYHEQLLRAGLTMAPLEPEGS

SEQ ID NO: 7611 - protein, 95 aa, Thermosynechococcus elongatus; identical to SEQ ID NO: 1

SEQ ID NO: 7612 - protein, 95 aa, Thermosynechococcus elongatus; identical to SEQ ID NO: 46

SEQ ID NO: 7613 - protein, 95 aa, Thermosynechococcus elongatus; identical to SEQ ID NO: 22

SEQ ID NO: 7614 - protein, 95 aa, Thermosynechococcus elongatus; identical to SEQ ID NO: 1

SEQ ID NO: 7615 - protein, 95 aa, Thermosynechococcus elongatus
ASVVPQEGQQVTRKHYPNYKVIVLNDDFNTFQHVVACLKKYIPNMISDRAWELTNQVHYKGQAIVWVGPQVQAELDHEHWLRAGLTIAPLEPGGS

SEQ ID NO: 7616 - protein, 95 aa, Thermosynechococcus elongatus; identical to SEQ ID NO: 1

SEQ ID NO: 7617 - protein, 95 aa, Thermosynechococcus elongatus; identical to SEQ ID NO: 7408

SEQ ID NO: 7618 - protein, 95 aa, Thermosynechococcus elongatus; identical to SEQ ID NO: 7554

SEQ ID NO: 7619 - protein, 95 aa, Thermosynechococcus elongatus
ASVVPQEGQQVTRKHYPNYKVIVLNDDFNTFQHVVGCLKKYIPNMISDRAWELTNQVHYGGRAIVWVGPQEQAELYHEQLLRAGLTMAPLEPGGS

SEQ ID NO: 7620 - protein, 95 aa, Thermosynechococcus elongatus; identical to SEQ ID NO: 434

SEQ ID NO: 7621 - protein, 95 aa, Thermosynechococcus elongatus
ASVVPQEGQQVTRKHYPNYKVIVLNDDFNTFQHVVVCLKKYIPNMISDRAWELTNQVHYGGRAIVWVGPQEQAELYHEQLLRAGLTMAPLEPGGS

SEQ ID NO: 7622 - protein, 95 aa, Thermosynechococcus elongatus
ASVVPQEGQQVTRKHYPNYKVIVLNDDFNTFQHVVSCLKKYIPNMISDRAWELTNQVHYKGQAIVWVGPQEQAELNHEQLLRAGLTMAPLEPEGS

SEQ ID NO: 7623 - protein, 95 aa, Thermosynechococcus elongatus
ASVVPQEGQQVTRKHYPNYKVIVLNDDFNTFQHVVSCLKKYIPNMISDRAWELTNQVHYKGQAIVLVGPQEQAELNHEQLLRAGLTMAPLEPEGS

SEQ ID NO: 7624 - protein, 95 aa, Thermosynechococcus elongatus
ASVVPQEGQQVTRKHYPNYKVIVLNDDFNTFQHVFACLKKYIPNMISDRAWELTNQVHYGGRAIVWVGPQEQAELYHEQLLRAGLTMAPLEPEGS

SEQ ID NO: 7625 - protein, 95 aa, Thermosynechococcus elongatus
ASVVPQEGQQVTRKHYPNYKVIVLNDDFNTFQHFAACLMKYIPNMTSDRAWELTNQVHYEGQAIVWVGPQEQAELYHEQLLRAGLTMAPLEPGGS

SEQ ID NO: 7626 - protein, 36 aa, Thermosynechococcus elongatus
ASVVPQEGQQVTRKHYPNYKVIVLNDDFNTFQHFVA

SEQ ID NO: 7627 - protein, 95 aa, Thermosynechococcus elongatus
ASVVPQEGQQVTRKHYPNYKVIVLNDDFNTFQHFVACLKKYITNMISDRAWELTNQVHYGGRAIVWVGPQEQAELYHEQLLRAGLTMAPLEPEGS

SEQ ID NO: 7628 - protein, 95 aa, Thermosynechococcus elongatus
ASVVPQEGQQVTRKHYPNYKVIVLNDDFNTFQHFVACLKKYIPKMISDRACELTNQVHYGGRAIVWVGPQEQAELYHEQLLRAGLTMAPLEPEGS

SEQ ID NO: 7629 - protein, 95 aa, Thermosynechococcus elongatus
ASVVPQEGQQVTRKHYPNYKVIVLNDDFNTFQHFVACLKKYIPNMISDRAWELTKQVHYGGRAIVWVGPQEQAELYHEQLLRAGLTMAPLEPEGS

SEQ ID NO: 7630 - protein, 95 aa, Thermosynechococcus elongatus
ASVVPQEGQQVTRKHYPNYKVIVLNDDFNTFQHFVACLKKYIPNMISDRAWELTNKVHYGGRAIVWVGPQEQAELYHEQLLRAGLTMAPLEPEGS

SEQ ID NO: 7631 - protein, 95 aa, Thermosynechococcus elongatus
ASVVPQEGQQVTRKHYPNYKVIVLNDDFNTFQHFVACLKKYIPNMISDRAWELTNQVHYEGQAIVWVGPQVQAELYHEQLLRAGLTMAPLEPGGS

SEQ ID NO: 7632 - protein, 95 aa, Thermosynechococcus elongatus; identical to SEQ ID NO: 375

SEQ ID NO: 7633 - protein, 95 aa, Thermosynechococcus elongatus
ASVVPQEGQQVTRKHYPNYKVIVLNDDFNTFQHFVACLKKYIPNMISDRAWELTNQVHYGGRAIVWVGPQEQAELYPEQVLRAGLTLAPLEPEGS

SEQ ID NO: 7634 - protein, 95 aa, Thermosynechococcus elongatus
ASVVPQEGQQVTRKHYPNYKVIVLNDDFNTFQHFVACLKKYIPNMISDRAWELTNQVHYGGRAIVCVGPQEQAELYHEQLLRAGLTMAPLEPEGS

SEQ ID NO: 7635 - protein, 95 aa, Thermosynechococcus elongatus
ASVVPQEGQQVTRKHYPNYKVIVLNDDFNTFQHFVACLKKYIPNMISDRAWELTNQVHYGGRSIVWVGPQEQAELYHEQLLRAGLTLAPLEPEGS

SEQ ID NO: 7636 - protein, 40 aa, Thermosynechococcus elongatus
ASVVPQEGQQVTRKHYPNYKVIVLNDDFNTFQHFVACFKK

SEQ ID NO: 7637 - protein, 95 aa, Thermosynechococcus elongatus; identical to SEQ ID NO: 1116

SEQ ID NO: 7638 - protein, 95 aa, Thermosynechococcus elongatus; identical to SEQ ID NO: 1

SEQ ID NO: 7639 - protein, 95 aa, Thermosynechococcus elongatus
ASVVPQEGQQVTRKHYPNYKVIVLNDDFNTFQLVVACLKKYIPNKNSDRAWELTNQVHYEGQAIVWVGPQEQAELYHEQLLRAGLTMAPLEPEGS

SEQ ID NO: 7640 - protein, 95 aa, Thermosynechococcus elongatus
ASVVPQEGQQVTRKHYPNYKVIVLNDDFNTFQLVVACLKKYIPNMTSDRAWELTNQVHYKGQAIVWVGPQEQAELNHEQLLRAGLTMAPLEPEGS

SEQ ID NO: 7641 - protein, 95 aa, Thermosynechococcus elongatus
ASVVPQEGQQVTRKHYPNYKVIVLNDDFNTFQYVVACLKKYIPNMISDRAWELTNQVHYEGQAIVWVGPQEQAELYHEQLLRAGLTMAPLEPEGS

SEQ ID NO: 7642 - protein, 95 aa, Thermosynechococcus elongatus
ASVVPQEGQQVTRKHYPNYKVIVLNDDFNTFHHVVACLKKYIPNMISDRAWELTNQVHYGGRAIVWVGPQEQAELNHEQLMRAGLTMAPLEPEGS

SEQ ID NO: 7643 - protein, 95 aa, Thermosynechococcus elongatus
ASVVPQEGQQVTRKHYPNYKVIVLNDDFNTFHHVVACLKKYIPNMISDRAWELTNQVHYGGRAIVWVGPQEQAELYHEQLLRAGLTMAPLEPEGS

SEQ ID NO: 7644 - protein, 95 aa, Thermosynechococcus elongatus
ASVVPQEGQQVTRKHYPNYKVIVLNDDFNTFRNVAACLMKYIPNMTSDRAWELTNQVHYEGQAIVWVGPQEQAELYHEQLLRAGLTMAPLEPEGS

SEQ ID NO: 7645 - protein, 36 aa, Thermosynechococcus elongatus
ASVVPQEGQQVTRKHYPNYKVIVLNDDFNTFRHDAA

SEQ ID NO: 7646 - protein, 95 aa, Thermosynechococcus elongatus
ASVVPQEGQQVTRKHYPNYKVIVLNDDFNTFRHDAACLMKYIPNMTSDRAWELTNQVHYKGQAIVWVGPQEQAELNHEQLLRAGLTMAPLEPEGS

SEQ ID NO: 7647 - protein, 95 aa, Thermosynechococcus elongatus; identical to SEQ ID NO: 20

SEQ ID NO: 7648 - protein, 95 aa, Thermosynechococcus elongatus; identical to SEQ ID NO: 23

SEQ ID NO: 7649 - protein, 95 aa, Thermosynechococcus elongatus
ASVVPQEGQQVTRKHYPNYKVIVLNDDFNTFRHVDACLKKYIPNMSSDRAWELTNQVHYGGRAIVWVGPQEQAELYHEQLLRAGLTMAPLEPEGS

SEQ ID NO: 7650 - protein, 95 aa, Thermosynechococcus elongatus; identical to SEQ ID NO: 11

SEQ ID NO: 7651 - protein, 36 aa, Thermosynechococcus elongatus; identical to SEQ ID NO: 1979

SEQ ID NO: 7652 - protein, 36 aa, Thermosynechococcus elongatus; identical to SEQ ID NO: 1979

SEQ ID NO: 7653 - protein, 95 aa, Thermosynechococcus elongatus
ASVVPQEGQQVTRKHYPNYKVIVLNDDFNTFRHVAACLKKYIPNMISDRAWELTNQVHYEGQAIVWVGPQEQAELYHEQLLRAGLTMAPLEPEGS

SEQ ID NO: 7654 - protein, 95 aa, Thermosynechococcus elongatus; identical to SEQ ID NO: 192

SEQ ID NO: 7655 - protein, 95 aa, Thermosynechococcus elongatus
ASVVPQEGQQVTRKHYPNYKVIVLNDDFNTFRHVAACLKKYIPNMISDRAWELTNQVHYGGRAIVWVGPQEQAELYHEQLVRAGLTMAPLEPEGS

SEQ ID NO: 7656 - protein, 95 aa, Thermosynechococcus elongatus; identical to SEQ ID NO: 192

SEQ ID NO: 7657 - protein, 95 aa, Thermosynechococcus elongatus; identical to SEQ ID NO: 192

SEQ ID NO: 7658 - protein, 95 aa, Thermosynechococcus elongatus
ASVVPQEGQQVTRKHYPNYKVIVLNDDFNTFRHVAACLKKYIPNMISDRAWELTNQVHYVGQAIVWVGPQERAELYHEQLLRAGLTMAPLEPEGS

SEQ ID NO: 7659 - protein, 95 aa, Thermosynechococcus elongatus
ASVVPQEGQQVTRKHYPNYKVIVLNDDFNTFRHVAACLKKCIPNMTSDRAWELTNQVHYEGQAIVWVGPQEQAELYHEQLLRAGLTMAPLEPEGS

SEQ ID NO: 7660 - protein, 40 aa, Thermosynechococcus elongatus
ASVVPQEGQQVTRKHYPNYKVIVLNDDFNTFRHVAACLMK

SEQ ID NO: 7661 - protein, 40 aa, Thermosynechococcus elongatus; identical to SEQ ID NO: 7660

SEQ ID NO: 7662 - protein, 95 aa, Thermosynechococcus elongatus
ASVVPQEGQQVTRKHYPNYKVIVLNDDFNTFRHVAACLMKYNPNMTSDRAWELTNQVHYEGQAIVWVGPQEQAELYHEQLLRTGLTMAPLEPEGS

SEQ ID NO: 7663 - protein, 95 aa, Thermosynechococcus elongatus
ASVVPQEGQQVTRKHYPNYKVIVLNDDFNTFRHVAACLMKYITNKTSDRAWELTNQVHYEGQAIVWVGPQEQAELYHEQLLRAGLTMAPLEPEGS

SEQ ID NO: 7664 - protein, 95 aa, Thermosynechococcus elongatus
ASVVPQEGQQVTRKHYPNYKVIVLNDDFNTFRHVAACLMKYITNMTSDRAWELTNKVHYKAQAIVWVGPQEQAELNHEQLLRAGLTMAPFEPGGS

SEQ ID NO: 7665 - protein, 95 aa, Thermosynechococcus elongatus
ASVVPQEGQQVTRKHYPNYKVIVLNDDFNTFRHVAACLMKYIQNMTSDRAWELTNQVHYEGQAIVWVGPQEQAELCHEQLLRAGLTMAPLEPEGS

SEQ ID NO: 7666 - protein, 95 aa, Thermosynechococcus elongatus
ASVVPQEGQQVTRKHYPNYKVIVLNDDFNTFRHVAACLMKYIQNMISDRAWELTNQVHYGGRAIVWVGPQEQAELYNEQLLRAGLTMAPLEPEGS

SEQ ID NO: 7667 - protein, 44 aa, Thermosynechococcus elongatus
ASVVPQEGQQVTRKHYPNYKVIVLNDDFNTFRHVAACLMKYIPT

SEQ ID NO: 7668 - protein, 95 aa, Thermosynechococcus elongatus
ASVVPQEGQQVTRKHYPNYKVIVLNDDFNTFRHVAACLMKYIPKMTSDRAWELTNQVHYKGQAIVWVGPQEQAELNHEQLLRAGLTMAPLEPEGS

SEQ ID NO: 7669 - protein, 95 aa, Thermosynechococcus elongatus
ASVVPQEGQQVTRKHYPNYKVIVLNDDFNTFRHVAACLMKYIPKMTSDRAWELTNQVHYEGQAIVWVGPQEQAELYHEQLLRAGLTMAPLEPEGS

SEQ ID NO: 7670 - protein, 95 aa, Thermosynechococcus elongatus; identical to SEQ ID NO: 23

SEQ ID NO: 7671 - protein, 95 aa, Thermosynechococcus elongatus
ASVVPQEGQQVTRKHYPNYKVIVLNDDFNTFRHVAACLMKYIPNKTYDRAWELTNQVHYEGQAIVWVGPQEQAELYHEQLLRAGLTMAPLEPEGS

SEQ ID NO: 7672 - protein, 95 aa, Thermosynechococcus elongatus
ASVVPQEGQQVTRKHYPNYKVIVLNDDFNTFRHVAACLMKYIPNKTSDRAWESTNQVHYEGQAIVWVGPQEQAELYHEQLLRAGLTMAPLEPEGS

SEQ ID NO: 7673 - protein, 95 aa, Thermosynechococcus elongatus
ASVVPQEGQQVTRKHYPNYKVIVLNDDFNTFRHVAACLMKYIPNKTSDRAWELTNQAHYEGQAIVWVGPQEQAELYHEQLLRAGLTMAPLEPEGS

SEQ ID NO: 7674 - protein, 95 aa, Thermosynechococcus elongatus
ASVVPQEGQQVTRKHYPNYKVIVLNDDFNTFRHVAACLMKYIPNKTSDRAWELTNQVHYEGKAIVWVGPQEQAELYHEQLLRAGLTMAPLEPEGS

SEQ ID NO: 7675 - protein, 95 aa, Thermosynechococcus elongatus
ASVVPQEGQQVTRKHYPNYKVIVLNDDFNTFRHVAACLMKYIPNKTSDRAWELTNQVHYEGQAIVWVGPQEQAELYHEQWLRAGLTMATLEPEGS

SEQ ID NO: 7676 - protein, 95 aa, Thermosynechococcus elongatus; identical to SEQ ID NO: 1983

SEQ ID NO: 7677 - protein, 95 aa, Thermosynechococcus elongatus; identical to SEQ ID NO: 23

SEQ ID NO: 7678 - protein, 95 aa, Thermosynechococcus elongatus
ASVVPQEGQQVTRKHYPNYKVIVLNDDFNTFRHVAACLMKYIPNKTSDRAWELTNQVHYEGQAIVWVGPQEQAELDPEQLLRAGLTMAPLEPEGS

SEQ ID NO: 7679 - protein, 95 aa, Thermosynechococcus elongatus
ASVVPQEGQQVTRKHYPNYKVIVLNDDFNTFRHVAACLMKYIPNKTSDRAWELTNQVHYEGQAIVWVGPQEQAELYHEQVLRAGLTMAPLEPEGS

SEQ ID NO: 7680 - protein, 95 aa, Thermosynechococcus elongatus
ASVVPQEGQQVTRKHYPNYKVIVLNDDFNTFRHVAACLMKYIPNKTSDRAWELTNQVHYEGQAIVWVGPQEQAELYHEQLWRAGLTRAPLEPEGS

SEQ ID NO: 7681 - protein, 95 aa, Thermosynechococcus elongatus
ASVVPQEGQQVTRKHYPNYKVIVLNDDFNTFRHVAACLMKYIPNKTSDRAWELTNQVHYEGQAIVWVGPQEQAELYHEQLWRAGLTMAPLEPEGS

SEQ ID NO: 7682 - protein, 95 aa, Thermosynechococcus elongatus; identical to SEQ ID NO: 7681

SEQ ID NO: 7683 - protein, 95 aa, Thermosynechococcus elongatus
ASVVPQEGQQVTRKHYPNYKVIVLNDDFNTFRHVAACLMKYIPNKTSDRAWELTNQVHYEGQAIVWVGPQEQAELYHEQLLRAGLTMATLEPEGS

SEQ ID NO: 7684 - protein, 95 aa, Thermosynechococcus elongatus
ASVVPQEGQQVTRKHYPNYKVIVLNDDFNTFRHVAACLMKYIPNKTSDRAWELTNQVHYEGQAIVWVGPQEQAELYHEQLLRAGLTMAQLEPEGS

SEQ ID NO: 7685 - protein, 95 aa, Thermosynechococcus elongatus
ASVVPQEGQQVTRKHYPNYKVIVLNDDFNTFRHVAACLMKYIPNKTSDRAWELTNQVHYEGQAIVWVGPQEQAELYHEQLLRAGLTMAPLEPDGS

SEQ ID NO: 7686 - protein, 95 aa, Thermosynechococcus elongatus
ASVVPQEGQQVTRKHYPNYKVIVLNDDFNTFRHVAACLMKYIPNKTSDRAWELTNQVHYEGQAIVWVGPQEQAELYHEQLLRAGLTMAPLDPEGS

SEQ ID NO: 7687 - protein, 95 aa, Thermosynechococcus elongatus
ASVVPQEGQQVTRKHYPNYKVIVLNDDFNTFRHVAACLMKYIPNKTSDRAWELTNQVHYEGQAIVWVGPQEQAELYHEQLLRAGLTMALLEPEGS

SEQ ID NO: 7688 - protein, 95 aa, Thermosynechococcus elongatus
ASVVPQEGQQVTRKHYPNYKVIVLNDDFNTFRHVAACLMKYIPNKTSDRAWELTNQVHYEGQAIVWVGPQEQAELYHEQLLRAGLTMSPLEPEGS

SEQ ID NO: 7689 - protein, 95 aa, Thermosynechococcus elongatus
ASVVPQEGQQVTRKHYPNYKVIVLNDDFNTFRHVAACLMKYIPNKTSDRAWELTNQVHYEGQAIVWVGPQEQAELYHEQLLRAGLTLAPLEPEGS

SEQ ID NO: 7690 - protein, 95 aa, Thermosynechococcus elongatus
ASVVPQEGQQVTRKHYPNYKVIVLNDDFNTFRHVAACLMKYIPNKTSDRAWELTNQVHYEGQAIVWVGPQEQAELYHEQLLRACLTMAPLEPEGS

SEQ ID NO: 7691 - protein, 95 aa, Thermosynechococcus elongatus
ASVVPQEGQQVTRKHYPNYKVIVLNDDFNTFRHVAACLMKYIPNKTSDRAWELTNQVHYEGQAIVWVGPQEQAELYHEQLLSAGLTMAPLEPEGS

SEQ ID NO: 7692 - protein, 90 aa, Thermosynechococcus elongatus
ASVVPQEGQQVTRKHYPNYKVIVLNDDFNTFRHVAACLMKYIPNKTSDRAWELTNQVHYEGQAIVWVGPQEQAELYHEQLLSAGLTMAPL

SEQ ID NO: 7693 - protein, 95 aa, Thermosynechococcus elongatus
ASVVPQEGQQVTRKHYPNYKVIVLNDDFNTFRHVAACLMKYIPNKTSDRAWELTNQVHYEGQAIVWVGPQEQAELYHEHLLRAGLTMAPLEPEGS

SEQ ID NO: 7694 - protein, 95 aa, Thermosynechococcus elongatus
ASVVPQEGQQVTRKHYPNYKVIVLNDDFNTFRHVAACLMKYIPNKTSDRAWELTNQVHYEGQAIVWVGPQEQAELYHEHLLRAGLTMAPLEPGGS

SEQ ID NO: 7695 - protein, 95 aa, Thermosynechococcus elongatus; identical to SEQ ID NO: 23

SEQ ID NO: 7696 - protein, 95 aa, Thermosynechococcus elongatus
ASVVPQEGQQVTRKHYPNYKVIVLNDDFNTFRHVAACLMKYIPNKTSDRAWELTNQVHYEGQAIVWVGPQEQAELCHEQLLRAGLTMAPLEPEGS

SEQ ID NO: 7697 - protein, 95 aa, Thermosynechococcus elongatus
ASVVPQEGQQVTRKHYPNYKVIVLNDDFNTFRHVAACLMKYIPNKTSDRAWELTNQVHYEGQAIVWVGPQEQADLYHEQLLRAGLTMAPLEPEGS

SEQ ID NO: 7698 - protein, 95 aa, Thermosynechococcus elongatus; identical to SEQ ID NO: 6816

SEQ ID NO: 7699 - protein, 95 aa, Thermosynechococcus elongatus
ASVVPQEGQQVTRKHYPNYKVIVLNDDFNTFRHVAACLMKYIPNKTSDRAWELTNQVHYEGQAIVWVGPQEQVELYHEQLLRAGLTMAPLEPEGS

SEQ ID NO: 7700 - protein, 95 aa, Thermosynechococcus elongatus
ASVVPQEGQQVTRKHYPNYKVIVLNDDFNTFRHVAACLMKYIPNKTSDRAWELTNQVHYEGQAIVWVGPQEQSELYHEQLLRAGLTMAPLEPEGS

SEQ ID NO: 7701 - protein, 95 aa, Thermosynechococcus elongatus
ASVVPQEGQQVTRKHYPNYKVIVLNDDFNTFRHVAACLMKYIPNKTSDRAWELTNQVHYEGQAIVWVGPQVQAELYHEQLLRAGLTMAPLEPEGS

SEQ ID NO: 7702 - protein, 95 aa, Thermosynechococcus elongatus
ASVVPQEGQQVTRKHYPNYKVIVLNDDFNTFRHVAACLMKYIPNKTSDRAWELTNQVHYEGQAIVWVGPREQAELYHEQLLRAGLTMAPLEPEGS

SEQ ID NO: 7703 - protein, 95 aa, Thermosynechococcus elongatus
ASVVPQEGQQVTRKHYPNYKVIVLNDDFNTFRHVAACLMKYIPNKTSDRAWELTNQVHYEGQAIVWVGPREQAELYHEQLLRVGLTMAPLEPEGS

SEQ ID NO: 7704 - protein, 95 aa, Thermosynechococcus elongatus
ASVVPQEGQQVTRKHYPNYKVIVLNDDFNTFRHVAACLMKYIPNKTSDRAWELTNQVHYEGQAIVWVGPLEQAELYHEQLLRAGLTMAPLEPEGS

SEQ ID NO: 7705 - protein, 95 aa, Thermosynechococcus elongatus
ASVVPQEGQQVTRKHYPNYKVIVLNDDFNTFRHVAACLMKYIPNKTSDRAWELTNQVHYEGQAIVLVGPQEQAELYHEQLLRAGLTMAPLEPEGS

SEQ ID NO: 7706 - protein, 95 aa, Thermosynechococcus elongatus
ASVVPQEGQQVTRKHYPNYKVIVLNDDFNTFRHVAACLMKYIPNKTSDRAWELTNQVHYEGRAIVWVGPQEQAELYHEQLLRAGLTMAPLEPEGS

SEQ ID NO: 7707 - protein, 95 aa, Thermosynechococcus elongatus
ASVVPQEGQQVTRKHYPNYKVIVLNDDFNTFRHVAACLMKYIPNKTSDRAWELTNQVHYEGLAIVWVGPLEQAELYHEQLLRAGLTMAPLEPEGS

SEQ ID NO: 7708 - protein, 95 aa, Thermosynechococcus elongatus
ASVVPQEGQQVTRKHYPNYKVIVLNDDFNTFRHVAACLMKYIPNKTSDRAWELTNQVHYGGRAIVWVGPQEQAELYHEQLLRAGLTMAPLEPGGS

SEQ ID NO: 7709 - protein, 95 aa, Thermosynechococcus elongatus; identical to SEQ ID NO: 6700

SEQ ID NO: 7710 - protein, 95 aa, Thermosynechococcus elongatus
ASVVPQEGQQVTRKHYPNYKVIVLNDDFNTFRHVAACLMKYIPNKTSDRAWELTNQVHYVGQAIVWVGPQEQAELNHEQLLRAGLTMAPLEPEGS

SEQ ID NO: 7711 - protein, 95 aa, Thermosynechococcus elongatus; identical to SEQ ID NO: 6700

SEQ ID NO: 7712 - protein, 95 aa, Thermosynechococcus elongatus
ASVVPQEGQQVTRKHYPNYKVIVLNDDFNTFRHVAACLMKYIPNKTSDRAWELTNQVHYVGQAIVWVGPQEQAELYHEQLLRAGLTMAPLEPKGS

SEQ ID NO: 7713 - protein, 95 aa, Thermosynechococcus elongatus
ASVVPQEGQQVTRKHYPNYKVIVLNDDFNTFRHVAACLMKYIPNKTSDRAWELTNQVHYSGLAIVWVGPQEQAELNHEQLLRAGLTMAPLEPEGS

SEQ ID NO: 7714 - protein, 95 aa, Thermosynechococcus elongatus
ASVVPQEGQQVTRKHYPNYKVIVLNDDFNTFRHVAACLMKYIPNKTSDRAWELTNQVHFEGQAIVWVGPQEQAELYHEQLLRAGLTMAPLEPEGS

SEQ ID NO: 7715 - protein, 95 aa, Thermosynechococcus elongatus
ASVVPQEGQQVTRKHYPNYKVIVLNDDFNTFRHVAACLMKYIPNKTSDRAWELTNQVHFGGRAIVWVGPQEQAELYHEQLLRAGLTMAPLEPEGS

SEQ ID NO: 7716 - protein, 95 aa, Thermosynechococcus elongatus
ASVVPQEGQQVTRKHYPNYKVIVLNDDFNTFRHVAACLMKYIPNKTSDRAWELTNQVLYVGLAIVWVGPQEQAELYHEHLLRAGLTMAPLVPEGS

SEQ ID NO: 7717 - protein, 95 aa, Thermosynechococcus elongatus
ASVVPQEGQQVTRKHYPNYKVIVLNDDFNTFRHVAACLMKYIPNKTSDRAWELTNRVHYEGQAIVWVGPQVQAELYHEQLLRAGLTMAPLEPGGS

SEQ ID NO: 7718 - protein, 95 aa, Thermosynechococcus elongatus
ASVVPQEGQQVTRKHYPNYKVIVLNDDFNTFRHVAACLMKYIPNKTSDRAWELTHQVHYEGQAIVWVGPQEQAELYHEQLLRAGLTMAPLEPEGS

SEQ ID NO: 7719 - protein, 95 aa, Thermosynechococcus elongatus
ASVVPQEGQQVTRKHYPNYKVIVLNDDFNTFRHVAACLMKYIPNKTSDRAWEFTNQVHYVGQAIVWVGPQERAELYHEQLLRAGLTMAPLEPEGS

SEQ ID NO: 7720 - protein, 95 aa, Thermosynechococcus elongatus
ASVVPQEGQQVTRKHYPNYKVIVLNDDFNTFRHVAACLMKYIPNKTSDRAWGLTNQVHYVGQAIVWVGPQERAELYHEQLLRAGLTMAPLEPEGS

SEQ ID NO: 7721 - protein, 95 aa, Thermosynechococcus elongatus; identical to SEQ ID NO: 437

SEQ ID NO: 7722 - protein, 95 aa, Thermosynechococcus elongatus; identical to SEQ ID NO: 11

SEQ ID NO: 7723 - protein, 95 aa, Thermosynechococcus elongatus
ASVVPQEGQQVTRKHYPNYKVIVLNDDFNTFRHVAACLMKYIPNMTSDRAWELTNQVHYEGQAIVWVGPQEQAELYHEQLVRAGLTMATLEPEGS

SEQ ID NO: 7724 - protein, 95 aa, Thermosynechococcus elongatus
ASVVPQEGQQVTRKHYPNYKVIVLNDDFNTFRHVAACLMKYIPNMTPDRAWELTNQVNYEGQAIVWVGPQEQAELYHEQLLRAGLTMAPLEPEGS

SEQ ID NO: 7725 - protein, 95 aa, Thermosynechococcus elongatus
ASVVPQEGQQVTRKHYPNYKVIVLNDDFNTFRHVAACLMKYIPNMTYDRAWELTNQVHYEGQAIVWVGPQEQAELYHEQLLRAGLTMAPLEPEGS

SEQ ID NO: 7726 - protein, 95 aa, Thermosynechococcus elongatus
ASVVPQEGQQVTRKHYPNYKVIVLNDDFNTFRHVAACLMKYIPNMTYDRAWELTNQVHYEGQAIVWVGPQVQAELYHEQLLRAGLTMAPLEPGGS

SEQ ID NO: 7727 - protein, 95 aa, Thermosynechococcus elongatus
ASVVPQEGQQVTRKHYPNYKVIVLNDDFNTFRHVAACLMKYIPNMTSDRDWELTNQVHYEGQAIVWVGPQEQAELYHEQLLRAGLTMAPLEPEGS

SEQ ID NO: 7728 - protein, 95 aa, Thermosynechococcus elongatus
ASVVPQEGQQVTRKHYPNYKVIVLNDDFNTFRHVAACLMKYIPNMTSDRAWKLTNQVHYEGQAIVWVGPQEQAELYHEQLLRAGLTMAPLEPEGS

SEQ ID NO: 7729 - protein, 95 aa, Thermosynechococcus elongatus
ASVVPQEGQQVTRKHYPNYKVIVLNDDFNTFRHVAACLMKYIPNMTSDRAWQLTNQVHYEGQAIVWVGPQVQAELYHEQLLRAGLTMAPLEPGGS

SEQ ID NO: 7730 - protein, 95 aa, Thermosynechococcus elongatus; identical to SEQ ID NO: 11

SEQ ID NO: 7731 - protein, 52 aa, Thermosynechococcus elongatus
ASVVPQEGQQVTRKHYPNYKVIVLNDDFNTFRHVAACLMKYIPNMTSDRAWE

SEQ ID NO: 7732 - protein, 95 aa, Thermosynechococcus elongatus
ASVVPQEGQQVTRKHYPNYKVIVLNDDFNTFRHVAACLMKYIPNMTSDRAWESTNQVHYEGQAIVWVGPQEQAELYHEQLLRAGLTMAPLEPEGS

SEQ ID NO: 7733 - protein, 58 aa, Thermosynechococcus elongatus
ASVVPQEGQQVTRKHYPNYKVIVLNDDFNTFRHVAACLMKYIPNMTSDRAWELTKQVH

SEQ ID NO: 7734 - protein, 95 aa, Thermosynechococcus elongatus
ASVVPQEGQQVTRKHYPNYKVIVLNDDFNTFRHVAACLMKYIPNMTSDRAWELTNKVHYEGQAIVWVGPQEQAELYHEQLLRAGLTMAPLEPEGS

SEQ ID NO: 7735 - protein, 95 aa, Thermosynechococcus elongatus
ASVVPQEGQQVTRKHYPNYKVIVLNDDFNTFRHVAACLMKYIPNMTSDRAWELTNQAHYEGQAIVWVGPQEQAELYHEQLLRAGLTMAPLEPEGS

SEQ ID NO: 7736 - protein, 95 aa, Thermosynechococcus elongatus
ASVVPQEGQQVTRKHYPNYKVIVLNDDFNTFRHVAACLMKYIPNMTSDRAWELTNQGHYEGQAIVWVGPQVQAELYHEQLLRAGLTMAPLEPGGS

SEQ ID NO: 7737 - protein, 95 aa, Thermosynechococcus elongatus; identical to SEQ ID NO: 20

SEQ ID NO: 7738 - protein, 95 aa, Thermosynechococcus elongatus; identical to SEQ ID NO: 278

SEQ ID NO: 7739 - protein, 95 aa, Thermosynechococcus elongatus
ASVVPQEGQQVTRKHYPNYKVIVLNDDFNTFRHVAACLMKYIPNMTSDRAWELTNQVHYKGQAIVWVGPQEQAELNHEQLLRAGLTMSPLEPEGS

SEQ ID NO: 7740 - protein, 95 aa, Thermosynechococcus elongatus; identical to SEQ ID NO: 278

SEQ ID NO: 7741 - protein, 95 aa, Thermosynechococcus elongatus
ASVVPQEGQQVTRKHYPNYKVIVLNDDFNTFRHVAACLMKYIPNMTSDRAWELTNQVHYEGKAIVWVGPQVQAELYHEQLLRAGLTMAPLEPGGS

SEQ ID NO: 7742 - protein, 95 aa, Thermosynechococcus elongatus
ASVVPQEGQQVTRKHYPNYKVIVLNDDFNTFRHVAACLMKYIPNMTSDRAWELTNQVHYEGQAIVWVGTQVQAELYHEQLLRAGLTMAPLEPGGS

SEQ ID NO: 7743 - protein, 95 aa, Thermosynechococcus elongatus; identical to SEQ ID NO: 20

SEQ ID NO: 7744 - protein, 95 aa, Thermosynechococcus elongatus
ASVVPQEGQQVTRKHYPNYKVIVLNDDFNTFRHVAACLMKYIPNMTSDRAWELTNQVHYEGQAIDWVGPQVQAELYHEQLLRAGLTMAPLEPGGS

SEQ ID NO: 7745 - protein, 95 aa, Thermosynechococcus elongatus
ASVVPQEGQQVTRKHYPNYKVIVLNDDFNTFRHVAACLMKYIPNMTSDRAWELTNQVHYEGQAIVWVGPQEQAELNHEQLLRAGLTMAPLEPGGS

SEQ ID NO: 7746 - protein, 95 aa, Thermosynechococcus elongatus; identical to SEQ ID NO: 11

SEQ ID NO: 7747 - protein, 95 aa, Thermosynechococcus elongatus; identical to SEQ ID NO: 126

SEQ ID NO: 7748 - protein, 95 aa, Thermosynechococcus elongatus
ASVVPQEGQQVTRKHYPNYKVIVLNDDFNTFRHVAACLMKYIPNMTSDRAWELTNQVHYEGQAIVRVGPQEQAELYHEQLLRAGLTMAPLEPGGS

SEQ ID NO: 7749 - protein, 95 aa, Thermosynechococcus elongatus; identical to SEQ ID NO: 11

SEQ ID NO: 7750 - protein, 95 aa, Thermosynechococcus elongatus; identical to SEQ ID NO: 20

SEQ ID NO: 7751 - protein, 95 aa, Thermosynechococcus elongatus
ASVVPQEGQQVTRKHYPNYKVIVLNDDFNTFRHVAACLMKYIPNMTSDRAWELTNQVHYEGQAIVWVGPQEQAKLYHEQLLRAGLTMAPLEPEGS

SEQ ID NO: 7752 - protein, 95 aa, Thermosynechococcus elongatus
ASVVPQEGQQVTRKHYPNYKVIVLNDDFNTFRHVAACLMKYIPNMTSDRAWELTNQVHYEGQAIVWVGPQEQAELYHKQLLRAGLTMAPLEPEGS

SEQ ID NO: 7753 - protein, 95 aa, Thermosynechococcus elongatus
ASVVPQEGQQVTRKHYPNYKVIVLNDDFNTFRHVAACLMKYIPNMTSDRAWELTNQVHYEGQAIVWVGPQEQAELYHEQVLRAGLTMAPLEPEGS

SEQ ID NO: 7754 - protein, 95 aa, Thermosynechococcus elongatus
ASVVPQEGQQVTRKHYPNYKVIVLNDDFNTFRHVAACLMKYIPNMTSDRAWELTNQVHYEGQAIVWVGPQEQAELYHEQWLRAGLTMAPLEPEGS

SEQ ID NO: 7755 - protein, 95 aa, Thermosynechococcus elongatus
ASVVPQEGQQVTRKHYPNYKVIVLNDDFNTFRHVAACLMKYIPNMTSDRAWELTNQVHYEGQAIVWVGPQEQAELYHEQLLRTGLTIAPLEPEGS

SEQ ID NO: 7756 - protein, 95 aa, Thermosynechococcus elongatus
ASVVPQEGQQVTRKHYPNYKVIVLNDDFNTFRHVAACLMKYIPNMTSDRAWELTNQVHYEGQAIVWVGPQEQAELYHEQLLRTGLTMAPLEPGGS

SEQ ID NO: 7757 - protein, 95 aa, Thermosynechococcus elongatus; identical to SEQ ID NO: 1175

SEQ ID NO: 7758 - protein, 95 aa, Thermosynechococcus elongatus
ASVVPQEGQQVTRKHYPNYKVIVLNDDFNTFRHVAACLMKYIPNMTSDRAWELTNQVHYEGQAIVWVGPQEQAELYHEQLLRAGLTIAPLEPEGS

SEQ ID NO: 7759 - protein, 95 aa, Thermosynechococcus elongatus
ASVVPQEGQQVTRKHYPNYKVIVLNDDFNTFRHVAACLMKYIPNMTSDRAWELTNQVHYEGQAIVWVGPQEQAELYHEQLLRAGLTMTPLEPEGS

SEQ ID NO: 7760 - protein, 94 aa, Thermosynechococcus elongatus
ASVVPQEGQQVTRKHYPNYKVIVLNDDFNTFRHVAACLMKYIPNMTSDRAWELTNQVHYEGQAIVWVGPQEQAELYHEQLLRAGLTMVHWNQKD

SEQ ID NO: 7761 - protein, 95 aa, Thermosynechococcus elongatus
ASVVPQEGQQVTRKHYPNYKVIVLNDDFNTFRHVAACLMKYIPNMTSDRAWELTNQVHYEGQAIVWVGPQEQAELYHEQLLRAGLTMATLEPEGS

SEQ ID NO: 7762 - protein, 90 aa, Thermosynechococcus elongatus
ASVVPQEGQQVTRKHYPNYKVIVLNDDFNTFRHVAACLMKYIPNMTSDRAWELTNQVHYEGQAIVWVGPQEQAELYHEQLLRAGLTMAQL

SEQ ID NO: 7763 - protein, 95 aa, Thermosynechococcus elongatus; identical to SEQ ID NO: 11

SEQ ID NO: 7764 - protein, 93 aa, Thermosynechococcus elongatus
ASVVPQEGQQVTRKHYPNYKVIVLNDDFNTFRHVAACLMKYIPNMTSDRAWELTNQVHYEGQAIVWVGPQEQAELYHEQLLRAGLTMAPLEPE

SEQ ID NO: 7765 - protein, 95 aa, Thermosynechococcus elongatus
ASVVPQEGQQVTRKHYPNYKVIVLNDDFNTFRHVAACLMKYIPNMTSDRAWELTNQVHYEGQAIVWVGPQEQAELYHEQLLRAGLTMAPLEPDGS

SEQ ID NO: 7766 - protein, 95 aa, Thermosynechococcus elongatus
ASVVPQEGQQVTRKHYPNYKVIVLNDDFNTFRHVAACLMKYIPNMTSDRAWELTNQVHYEGQAIVWVGPQEQAELYHEQLLRAGLTMAPLVPGGS

SEQ ID NO: 7767 - protein, 90 aa, Thermosynechococcus elongatus
ASVVPQEGQQVTRKHYPNYKVIVLNDDFNTFRHVAACLMKYIPNMTSDRAWELTNQVHYEGQAIVWVGPQEQAELYHEQLLRAGLTMAPL

SEQ ID NO: 7768 - protein, 95 aa, Thermosynechococcus elongatus
ASVVPQEGQQVTRKHYPNYKVIVLNDDFNTFRHVAACLMKYIPNMTSDRAWELTNQVHYEGQAIVWVGPQEQAELYHEQLLRAGLTMARLEPEGS

SEQ ID NO: 7769 - protein, 95 aa, Thermosynechococcus elongatus
ASVVPQEGQQVTRKHYPNYKVIVLNDDFNTFRHVAACLMKYIPNMTSDRAWELTNQVHYEGQAIVWVGPQEQAELYHEQLLRAGLTMYPLEPEGS

SEQ ID NO: 7770 - protein, 95 aa, Thermosynechococcus elongatus
ASVVPQEGQQVTRKHYPNYKVIVLNDDFNTFRHVAACLMKYIPNMTSDRAWELTNQVHYEGQAIVWVGPQEQAELYHEQLLRACLTMAPLEPEGS

SEQ ID NO: 7771 - protein, 95 aa, Thermosynechococcus elongatus
ASVVPQEGQQVTRKHYPNYKVIVLNDDFNTFRHVAACLMKYIPNMTSDRAWELTNQVHYEGQAIVWVGPQEQAELYHEQLLGAGLTMAPLEPEGS

SEQ ID NO: 7772 - protein, 81 aa, Thermosynechococcus elongatus
ASVVPQEGQQVTRKHYPNYKVIVLNDDFNTFRHVAACLMKYIPNMTSDRAWELTNQVHYEGQAIVWVGPQEQAELYHEQLL

SEQ ID NO: 7773 - protein, 95 aa, Thermosynechococcus elongatus
ASVVPQEGQQVTRKHYPNYKVIVLNDDFNTFRHVAACLMKYIPNMTSDRAWELTNQVHYEGQAIVWVGPQEQAELYHEHLLRAGLTMAPLEPEGS

SEQ ID NO: 7774 - protein, 95 aa, Thermosynechococcus elongatus
ASVVPQEGQQVTRKHYPNYKVIVLNDDFNTFRHVAACLMKYIPNMTSDRAWELTNQVHYEGQAIVWVGPQEQAELYHDQLLRAGLTRAPLEPEGS

SEQ ID NO: 7775 - protein, 95 aa, Thermosynechococcus elongatus
ASVVPQEGQQVTRKHYPNYKVIVLNDDFNTFRHVAACLMKYIPNMTSDRAWELTNQVHYEGQAIVWVGPQEQAELYHGQLLRAGLTMAPLEPEGS

SEQ ID NO: 7776 - protein, 95 aa, Thermosynechococcus elongatus
ASVVPQEGQQVTRKHYPNYKVIVLNDDFNTFRHVAACLMKYIPNMTSDRAWELTNQVHYEGQAIVWVGPQEQAELSHEQLLRAGLTMAPLEPEGS

SEQ ID NO: 7777 - protein, 95 aa, Thermosynechococcus elongatus
ASVVPQEGQQVTRKHYPNYKVIVLNDDFNTFRHVAACLMKYIPNMTSDRAWELTNQVHYEGQAIVWVGPQEQAEFYHEHLLRAGLTMAPLEPEGS

SEQ ID NO: 7778 - protein, 73 aa, Thermosynechococcus elongatus
ASVVPQEGQQVTRKHYPNYKVIVLNDDFNTFRHVAACLMKYIPNMTSDRAWELTNQVHYEGQAIVWVGPQEQA

SEQ ID NO: 7779 - protein, 95 aa, Thermosynechococcus elongatus
ASVVPQEGQQVTRKHYPNYKVIVLNDDFNTFRHVAACLMKYIPNMTSDRAWELTNQVHYEGQAIVWVGPQERAELYHEQLLRVGLTMAPLEPEGS

SEQ ID NO: 7780 - protein, 95 aa, Thermosynechococcus elongatus
ASVVPQEGQQVTRKHYPNYKVIVLNDDFNTFRHVAACLMKYIPNMTSDRAWELTNQVHYEGQAIVWVGPQELAELYHEQLLRAGLTMAPLEPEGS

SEQ ID NO: 7781 - protein, 95 aa, Thermosynechococcus elongatus; identical to SEQ ID NO: 11

SEQ ID NO: 7782 - protein, 95 aa, Thermosynechococcus elongatus
ASVVPQEGQQVTRKHYPNYKVIVLNDDFNTFRHVAACLMKYIPNMTSDRAWELTNQVHYEGQAIVWVGPQVQAELNHEQLLRAGLTMAPLEQEGS

SEQ ID NO: 7783 - protein, 95 aa, Thermosynechococcus elongatus
ASVVPQEGQQVTRKHYPNYKVIVLNDDFNTFRHVAACLMKYIPNMTSDRAWELTNQVHYEGQAIVWVGPQVQAELNHEQLLRAGLTMAPLEPEGS

SEQ ID NO: 7784 - protein, 95 aa, Thermosynechococcus elongatus
ASVVPQEGQQVTRKHYPNYKVIVLNDDFNTFRHVAACLMKYIPNMTSDRAWELTNQVHYEGQAIVWVGPQVQAELDHEQLLRAGLTRAPLEPEGS

SEQ ID NO: 7785 - protein, 95 aa, Thermosynechococcus elongatus
ASVVPQEGQQVTRKHYPNYKVIVLNDDFNTFRHVAACLMKYIPNMTSDRAWELTNQVHYEGQAIVWVGPQVQAELYQEQLLRAGLTMAPLEPGGS

SEQ ID NO: 7786 - protein, 95 aa, Thermosynechococcus elongatus
ASVVPQEGQQVTRKHYPNYKVIVLNDDFNTFRHVAACLMKYIPNMTSDRAWELTNQVHYEGQAIVWVGPQVQAELYHEQLLRAGLTRAPLEPGGS

SEQ ID NO: 7787 - protein, 92 aa, Thermosynechococcus elongatus
ASVVPQEGQQVTRKHYPNYKVIVLNDDFNTFRHVAACLMKYIPNMTSDRAWELTNQVHYEGQAIVWVGPQVQAELYHEQLLRAGLTMAPLEP

SEQ ID NO: 7788 - protein, 95 aa, Thermosynechococcus elongatus
ASVVPQEGQQVTRKHYPNYKVIVLNDDFNTFRHVAACLMKYIPNMTSDRAWELTNQVHYEGQAIVWVGPQVQAELYHEQLLRAGLTMAPLEPKGS

SEQ ID NO: 7789 - protein, 95 aa, Thermosynechococcus elongatus; identical to SEQ ID NO: 93

SEQ ID NO: 7790 - protein, 95 aa, Thermosynechococcus elongatus; identical to SEQ ID NO: 20

SEQ ID NO: 7791 - protein, 95 aa, Thermosynechococcus elongatus
ASVVPQEGQQVTRKHYPNYKVIVLNDDFNTFRHVAACLMKYIPNMTSDRAWELTNQVHYEGQAIVWVGPQVQAELYHEQLLRAGLTMAPLVPGGS

SEQ ID NO: 7792 - protein, 90 aa, Thermosynechococcus elongatus
ASVVPQEGQQVTRKHYPNYKVIVLNDDFNTFRHVAACLMKYIPNMTSDRAWELTNQVHYEGQAIVWVGPQVQAELYHEQLLRAGLTMAPL

SEQ ID NO: 7793 - protein, 95 aa, Thermosynechococcus elongatus
ASVVPQEGQQVTRKHYPNYKVIVLNDDFNTFRHVAACLMKYIPNMTSDRAWELTNQVHYEGQAIVWVGPQVQAELYHEQLLRAGLTLAPLEPGGS

SEQ ID NO: 7794 - protein, 95 aa, Thermosynechococcus elongatus
ASVVPQEGQQVTRKHYPNYKVIVLNDDFNTFRHVAACLMKYIPNMTSDRAWELTNQVHYEGQAIVWVGPQVQAELYHEQLLRVGLTMAPLEPEGS

SEQ ID NO: 7795 - protein, 95 aa, Thermosynechococcus elongatus
ASVVPQEGQQVTRKHYPNYKVIVLNDDFNTFRHVAACLMKYIPNMTSDRAWELTNQVHYEGQAIVWVGPQVQAELYHEQLLRVGLTMAPLEPGGS

SEQ ID NO: 7796 - protein, 95 aa, Thermosynechococcus elongatus
ASVVPQEGQQVTRKHYPNYKVIVLNDDFNTFRHVAACLMKYIPNMTSDRAWELTNQVHYEGQAIVWVGPQVQAVLYHEHLLRAGLTMAPLEPGGS

SEQ ID NO: 7797 - protein, 69 aa, Thermosynechococcus elongatus
ASVVPQEGQQVTRKHYPNYKVIVLNDDFNTFRHVAACLMKYIPNMTSDRAWELTNQVHYEGQAIVWVGP

SEQ ID NO: 7798 - protein, 77 aa, Thermosynechococcus elongatus
ASVVPQEGQQVTRKHYPNYKVIVLNDDFNTFRHVAACLMKYIPNMTSDRAWELTNQVHYEGQAIVWVGPREQAELFH

SEQ ID NO: 7799 - protein, 95 aa, Thermosynechococcus elongatus
ASVVPQEGQQVTRKHYPNYKVIVLNDDFNTFRHVAACLMKYIPNMTSDRAWELTNQVHYEGQAIVLVGPQVQAELYHEQLLRAGLTMAPLEPGGS

SEQ ID NO: 7800 - protein, 95 aa, Thermosynechococcus elongatus; identical to SEQ ID NO: 332

SEQ ID NO: 7801 - protein, 95 aa, Thermosynechococcus elongatus
ASVVPQEGQQVTRKHYPNYKVIVLNDDFNTFRHVAACLMKYIPNMTSDRAWELTNQVHYEGRAIVCVGPQEQAELYHEQLLRAGLTMAPLEPEGS

SEQ ID NO: 7802 - protein, 95 aa, Thermosynechococcus elongatus
ASVVPQEGQQVTRKHYPNYKVIVLNDDFNTFRHVAACLMKYIPNMTSDRAWELTNQVHYECQAIVWVGPQVQAELYHEQLLRAGLTMAPLEPGGS

SEQ ID NO: 7803 - protein, 95 aa, Thermosynechococcus elongatus
ASVVPQEGQQVTRKHYPNYKVIVLNDDFNTFRHVAACLMKYIPNMTSDRAWELTNQVHYECQAIVWVGPQEQAELYHEQLLRAGLTMAPLEPEGS

SEQ ID NO: 7804 - protein, 95 aa, Thermosynechococcus elongatus; identical to SEQ ID NO: 86

SEQ ID NO: 7805 - protein, 95 aa, Thermosynechococcus elongatus; identical to SEQ ID NO: 86

SEQ ID NO: 7806 - protein, 95 aa, Thermosynechococcus elongatus; identical to SEQ ID NO: 86

SEQ ID NO: 7807 - protein, 95 aa, Thermosynechococcus elongatus
ASVVPQEGQQVTRKHYPNYKVIVLNDDFNTFRHVAACLMKYIPNMTSDRAWELTNQVHYGGRAIVWVGPQEQAELYHEQLLRAGLTMAPLEPGGS

SEQ ID NO: 7808 - protein, 95 aa, Thermosynechococcus elongatus
ASVVPQEGQQVTRKHYPNYKVIVLNDDFNTFRHVAACLMKYIPNMTSDRAWELTNQVHYVGQAIVWVGPQVRAELYHEQLLRAGLTMAPLEPEGS

SEQ ID NO: 7809 - protein, 59 aa, Thermosynechococcus elongatus
ASVVPQEGQQVTRKHYPNYKVIVLNDDFNTFRHVAACLMKYIPNMTSDRAWELTNQVHY

SEQ ID NO: 7810 - protein, 95 aa, Thermosynechococcus elongatus
ASVVPQEGQQVTRKHYPNYKVIVLNDDFNTFRHVAACLMKYIPNMTSDRAWELTNQVHSEGQAIVWVGPQEQAELNHEHLLRAGLTRAPLEPEGS

SEQ ID NO: 7811 - protein, 95 aa, Thermosynechococcus elongatus
ASVVPQEGQQVTRKHYPNYKVIVLNDDFNTFRHVAACLMKYIPNMTSDRAWELTNQVYYGGRAIVWVGPQEQAELYHEQLLRAGLTMAPLEPEGS

SEQ ID NO: 7812 - protein, 95 aa, Thermosynechococcus elongatus
ASVVPQEGQQVTRKHYPNYKVIVLNDDFNTFRHVAACLMKYIPNMTSDRAWELTNHVHYEGQAIVWVGPQVQAELYHEQLLRAGLTMAPLEPGGS

SEQ ID NO: 7813 - protein, 95 aa, Thermosynechococcus elongatus
ASVVPQEGQQVTRKHYPNYKVIVLNDDFNTFRHVAACLMKYIPNMTSDRAWELTNHVHYEGQAIVWVGPQVQAELYHEQLLRAGLTLAPLEPGGS

SEQ ID NO: 7814 - protein, 95 aa, Thermosynechococcus elongatus
ASVVPQEGQQVTRKHYPNYKVIVLNDDFNTFRHVAACLMKYIPNMTSDRAWELTNHVHYEGQAIVWVGPQEQAELYHEQLLRAGLTMAPLEPEGS

SEQ ID NO: 7815 - protein, 95 aa, Thermosynechococcus elongatus
ASVVPQEGQQVTRKHYPNYKVIVLNDDFNTFRHVAACLMKYIPNMTSDRAWELTNRVHYEGQAIVWVGPQEQAELYHEQLLRAGLTMAPLEPEGS

SEQ ID NO: 7816 - protein, 95 aa, Thermosynechococcus elongatus
ASVVPQEGQQVTRKHYPNYKVIVLNDDFNTFRHVAACLMKYIPNMTSDRAWELTNLVHYEGQAIVWVGPQEQAELYHEQLLRAGLTMAPLEPEGS

SEQ ID NO: 7817 - protein, 95 aa, Thermosynechococcus elongatus
ASVVPQEGQQVTRKHYPNYKVIVLNDDFNTFRHVAACLMKYIPNMTSDRAWEFTNQVHYEGQAIVWVGPQEQAELYHEQLLRAGLTMAPLEPEGS

SEQ ID NO: 7818 - protein, 95 aa, Thermosynechococcus elongatus
ASVVPQEGQQVTRKHYPNYKVIVLNDDFNTFRHVAACLMKYIPNMTSDRAWEFTNQVHYEGQAIVWVGPQVQAELYHEQLLRAGLTMAPLEPEGS

SEQ ID NO: 7819 - protein, 95 aa, Thermosynechococcus elongatus; identical to SEQ ID NO: 20

SEQ ID NO: 7820 - protein, 95 aa, Thermosynechococcus elongatus
ASVVPQEGQQVTRKHYPNYKVIVLNDDFNTFRHVAACLMKYIPNMTSDRACELTNQVHYEGQAIVWVGPQEQAELYHEQLLRAGLTMAPLEPEGS

SEQ ID NO: 7821 - protein, 95 aa, Thermosynechococcus elongatus; identical to SEQ ID NO: 11

SEQ ID NO: 7822 - protein, 95 aa, Thermosynechococcus elongatus
ASVVPQEGQQVTRKHYPNYKVIVLNDDFNTFRHVAACLMKYIPNMTSDIAWELTNQVHYEGQAIVWVGPQEQAELYHEQLLRAGLTMAPLEPEGS

SEQ ID NO: 7823 - protein, 95 aa, Thermosynechococcus elongatus
ASVVPQEGQQVTRKHYPNYKVIVLNDDFNTFRHVAACLMKYIPNMISDRACELTNQVHYGGRAIVWVGPQEQAELYHEQLLRAGLTMAPLEPEGS

SEQ ID NO: 7824 - protein, 95 aa, Thermosynechococcus elongatus
ASVVPQEGQQVTRKHYPNYKVIVLNDDFNTFRHVAACLMKYIPNMISDRAWELTNQVHYKGQAIVWVGPQEQAELNHEQLLRAGLTMAPLEPEGS

SEQ ID NO: 7825 - protein, 95 aa, Thermosynechococcus elongatus
ASVVPQEGQQVTRKHYPNYKVIVLNDDFNTFRHVAACLMKYIPNMISDRAWELTNQVHYEGQAIVWVGPQVQAELYHEQLLRAGLTMAPLEPEGS

SEQ ID NO: 7826 - protein, 95 aa, Thermosynechococcus elongatus
ASVVPQEGQQVTRKHYPNYKVIVLNDDFNTFRHVAACLMKYIPNMISDRAWELTNQVHYGGRAIVWVGPQEQAELYHEQLLRAGLTMAPLEPGGS

SEQ ID NO: 7827 - protein, 95 aa, Thermosynechococcus elongatus; identical to SEQ ID NO: 151

SEQ ID NO: 7828 - protein, 95 aa, Thermosynechococcus elongatus
ASVVPQEGQQVTRKHYPNYKVIVLNDDFNTFRHVAACLMKYIPNMISDRAWELTNQVHFGGRAIVWVGPQEQAELYHEQLLRACLTMAPLEPEGS

SEQ ID NO: 7829 - protein, 95 aa, Thermosynechococcus elongatus
ASVVPQEGQQVTRKHYPNYKVIVLNDDFNTFRHVAACLMKYIPNMISDRAWGLTNQVHYGGRAIVWVGPQEQAELYHEQLLRAGLTMAPLEPEGS

SEQ ID NO: 7830 - protein, 95 aa, Thermosynechococcus elongatus
ASVVPQEGQQVTRKHYPNYKVIVLNDDFNTFRHVAACLMKYIPNMASDRAWELTNQVHYEGQAIVWVGPQEQAELYHEQLLRAGLTMAPLEPEGS

SEQ ID NO: 7831 - protein, 95 aa, Thermosynechococcus elongatus
ASVVPQEGQQVTRKHYPNYKVIVLNDDFNTFRHVAACLMKYIPNLTSDRAWELTNQVHYEGQAIVWVGPQEQAELYHEQLLRAGLTMAPLEPEGS

SEQ ID NO: 7832 - protein, 95 aa, Thermosynechococcus elongatus
ASVVPQEGQQVTRKHYPNYKVIVLNDDFNTFRHVAACLMKYIPNITSDRAWELTNQVHYEGQAIVWVGPQVQAELNHEQLLRAGLTMAPLEPEGS

SEQ ID NO: 7833 - protein, 95 aa, Thermosynechococcus elongatus
ASVVPQEGQQVTRKHYPNYKVIVLNDDFNTFRHVAACLMKYIPNMTPDRAWELTNQVHYKGQAIVWVGPQEQAELNHEQVLRAGLTMAPLEPEGS

SEQ ID NO: 7834 - protein, 95 aa, Thermosynechococcus elongatus
ASVVPQEGQQVTRKHYPNYKVIVLNDDFNTFRHVAACLMKYIPNMTSDRAWESTNQVHYKGQAIVWVGPQEQAELNHEQLLRAGLTMAPLEPEGS

SEQ ID NO: 7835 - protein, 95 aa, Thermosynechococcus elongatus
ASVVPQEGQQVTRKHYPNYKVIVLNDDFNTFRHVAACLMKYIPNMTSDRAWELTNQGHYKGQAIVWVGPQEQAELNHEQLLRAGLTMAPLEPEGS

SEQ ID NO: 7836 - protein, 95 aa, Thermosynechococcus elongatus
ASVVPQEGQQVTRKHYPNYKVIVLNDDFNTFRHVAACLMKYIPNMTSDRAWELTNQVHDKGQAIVWVGPQEQAELNHEQLLRAGLTMAPLEPEGS

SEQ ID NO: 7837 - protein, 95 aa, Thermosynechococcus elongatus; identical to SEQ ID NO: 17

SEQ ID NO: 7838 - protein, 95 aa, Thermosynechococcus elongatus
ASVVPQEGQQVTRKHYPNYKVIVLNDDFNTFRHVAACLMKYIPNMTSDRAWELTNQVHYKGQAIVWVAPQEQAELNHEQLLRAGLTMAPLEPEGS

SEQ ID NO: 7839 - protein, 95 aa, Thermosynechococcus elongatus; identical to SEQ ID NO: 17

SEQ ID NO: 7840 - protein, 95 aa, Thermosynechococcus elongatus
ASVVPQEGQQVTRKHYPNYKVIVLNDDFNTFRHVAACLMKYIPNMTSDRAWELTNQVHYKGQAIVWVGTQEQAELNHEQLLRAGLTMAPLEPEGS

SEQ ID NO: 7841 - protein, 95 aa, Thermosynechococcus elongatus
ASVVPQEGQQVTRKHYPNYKVIVLNDDFNTFRHVAACLMKYIPNMTSDRAWELTNQVHYKGQAIVWVGQQEQAELNHEQLLRAGLTMAPLEPEGS

SEQ ID NO: 7842 - protein, 95 aa, Thermosynechococcus elongatus
ASVVPQEGQQVTRKHYPNYKVIVLNDDFNTFRHVAACLMKYIPNMTSDRAWELTNQVHYKGQAIVWVGPQEQAELNHEQSLRAGLTRAPLEPEGS

SEQ ID NO: 7843 - protein, 95 aa, Thermosynechococcus elongatus
ASVVPQEGQQVTRKHYPNYKVIVLNDDFNTFRHVAACLMKYIPNMTSDRAWELTNQVHYKGQAIVWVGPQEQAELNHEQWLRAGLTMAPLEPEGS

SEQ ID NO: 7844 - protein, 95 aa, Thermosynechococcus elongatus
ASVVPQEGQQVTRKHYPNYKVIVLNDDFNTFRHVAACLMKYIPNMTSDRAWELTNQVHYKGQAIVWVGPQEQAELNHEQFLRAGLTMAPLEPDGS

SEQ ID NO: 7845 - protein, 95 aa, Thermosynechococcus elongatus
ASVVPQEGQQVTRKHYPNYKVIVLNDDFNTFRHVAACLMKYIPNMTSDRAWELTNQVHYKGQAIVWVGPQEQAELNHEQLLRDGLTMAPLEPEGS

SEQ ID NO: 7846 - protein, 95 aa, Thermosynechococcus elongatus; identical to SEQ ID NO: 17

SEQ ID NO: 7847 - protein, 95 aa, Thermosynechococcus elongatus
ASVVPQEGQQVTRKHYPNYKVIVLNDDFNTFRHVAACLMKYIPNMTSDRAWELTNQVHYKGQAIVWVGPQEQAELNHEQLLRAGLTRAPLEPEGS

SEQ ID NO: 7848 - protein, 92 aa, Thermosynechococcus elongatus
ASVVPQEGQQVTRKHYPNYKVIVLNDDFNTFRHVAACLMKYIPNMTSDRAWELTNQVHYKGQAIVWVGPQEQAELNHEQLLRAGLTMAPLEP

SEQ ID NO: 7849 - protein, 95 aa, Thermosynechococcus elongatus
ASVVPQEGQQVTRKHYPNYKVIVLNDDFNTFRHVAACLMKYIPNMTSDRAWELTNQVHYKGQAIVWVGPQEQAELNHEQLLRAGLTMAPLVPEGS

SEQ ID NO: 7850 - protein, 95 aa, Thermosynechococcus elongatus
ASVVPQEGQQVTRKHYPNYKVIVLNDDFNTFRHVAACLMKYIPNMTSDRAWELTNQVHYKGQAIVWVGPQEQAELNHEQLLRAGLTMVPLEPEGS

SEQ ID NO: 7851 - protein, 95 aa, Thermosynechococcus elongatus
ASVVPQEGQQVTRKHYPNYKVIVLNDDFNTFRHVAACLMKYIPNMTSDRAWELTNQVHYKGQAIVWVGPQEQAELNHEHLLRAGLTMAPLEPEGS

SEQ ID NO: 7852 - protein, 95 aa, Thermosynechococcus elongatus; identical to SEQ ID NO: 7851

SEQ ID NO: 7853 - protein, 95 aa, Thermosynechococcus elongatus
ASVVPQEGQQVTRKHYPNYKVIVLNDDFNTFRHVAACLMKYIPNMTSDRAWELTNQVHYKGQAIVWVGPQEQAELNPEQLLRAGLTMAPLEPEGS

SEQ ID NO: 7854 - protein, 95 aa, Thermosynechococcus elongatus
ASVVPQEGQQVTRKHYPNYKVIVLNDDFNTFRHVAACLMKYIPNMTSDRAWELTNQVHYKGQAIVWVGPQEQAELDHEQLLRAGLTMAPLEPEGS

SEQ ID NO: 7855 - protein, 95 aa, Thermosynechococcus elongatus
ASVVPQEGQQVTRKHYPNYKVIVLNDDFNTFRHVAACLMKYIPNMTSDRAWELTNQVHYKGQAIVWVGPQEQAELYHEQLLRVGLTMAPLEPEGS

SEQ ID NO: 7856 - protein, 95 aa, Thermosynechococcus elongatus
ASVVPQEGQQVTRKHYPNYKVIVLNDDFNTFRHVAACLMKYIPNMTSDRAWELTNQVHYKGQAIVWVGPQEQAVLNHEQLLRAGLTMAPLEPEGS

SEQ ID NO: 7857 - protein, 95 aa, Thermosynechococcus elongatus
ASVVPQEGQQVTRKHYPNYKVIVLNDDFNTFRHVAACLMKYIPNMTSDRAWELTNQVHYKGQAIVWVGPQERAELYHEQLLRAGLTMAPLEPEGS

SEQ ID NO: 7858 - protein, 95 aa, Thermosynechococcus elongatus
ASVVPQEGQQVTRKHYPNYKVIVLNDDFNTFRHVAACLMKYIPNMTSDRAWELTNQVHYKGQAIVWVGPQEEAELNHEQLLRAGLTMAPLEPEGS

SEQ ID NO: 7859 - protein, 95 aa, Thermosynechococcus elongatus; identical to SEQ ID NO: 2002

SEQ ID NO: 7860 - protein, 95 aa, Thermosynechococcus elongatus
ASVVPQEGQQVTRKHYPNYKVIVLNDDFNTFRHVAACLMKYIPNMTSDRAWELTNQVHYKGQAIVWVGPREQAELNHEQLLRAGLTMAPLEPEGS

SEQ ID NO: 7861 - protein, 95 aa, Thermosynechococcus elongatus
ASVVPQEGQQVTRKHYPNYKVIVLNDDFNTFRHVAACLMKYIPNMTSDRAWELTNQVHYKGQAIVWVVPQEQAELNHEQLLRAGLTMAPLEPEGS

SEQ ID NO: 7862 - protein, 95 aa, Thermosynechococcus elongatus
ASVVPQEGQQVTRKHYPNYKVIVLNDDFNTFRHVAACLMKYIPNMTSDRAWELTNQVHYKGQAIVCVGPQEQAELNHEQLLRAGLTMDTLEPEGS

SEQ ID NO: 7863 - protein, 95 aa, Thermosynechococcus elongatus
ASVVPQEGQQVTRKHYPNYKVIVLNDDFNTFRHVAACLMKYIPNMTSDRAWELTNQVHYKGQAIVRVGPQEQAELYHKQLLRAGLTMAPLEPEGS

SEQ ID NO: 7864 - protein, 95 aa, Thermosynechococcus elongatus; identical to SEQ ID NO: 278

SEQ ID NO: 7865 - protein, 95 aa, Thermosynechococcus elongatus
ASVVPQEGQQVTRKHYPNYKVIVLNDDFNTFRHVAACLMKYIPNMTSDRAWELTNQVHYKGQAIVWVGPQVQAELYHEQLLRAGLTMAPLEPEGS

SEQ ID NO: 7866 - protein, 95 aa, Thermosynechococcus elongatus
ASVVPQEGQQVTRKHYPNYKVIVLNDDFNTFRHVAACLMKYIPNMTSDRAWELTNQVHYKGQAIVWVGPREQAELYHEQLLRVGLTMAPLEPEGS

SEQ ID NO: 7867 - protein, 95 aa, Thermosynechococcus elongatus
ASVVPQEGQQVTRKHYPNYKVIVLNDDFNTFRHVAACLMKYIPNMTSDRAWELTNQVHYKGQSIVWVGPQEQAELNHEQLLRAGLTMAPLEPEGS

SEQ ID NO: 7868 - protein, 95 aa, Thermosynechococcus elongatus
ASVVPQEGQQVTRKHYPNYKVIVLNDDFNTFRHVAACLMKYIPNMTSDRAWELTNQVHYNGQAIVWVGPQEQAELNHEQLLRAGLTMAPLEPEGS

SEQ ID NO: 7869 - protein, 95 aa, Thermosynechococcus elongatus
ASVVPQEGQQVTRKHYPNYKVIVLNDDFNTFRHVAACLMKYIPNMTSDRAWELTNQVHYIGQAIVWVGPQEQAELNHEQLLRAGLTMAPLEPEGS

SEQ ID NO: 7870 - protein, 95 aa, Thermosynechococcus elongatus; identical to SEQ ID NO: 511

SEQ ID NO: 7871 - protein, 95 aa, Thermosynechococcus elongatus; identical to SEQ ID NO: 11

SEQ ID NO: 7872 - protein, 95 aa, Thermosynechococcus elongatus; identical to SEQ ID NO: 7758

SEQ ID NO: 7873 - protein, 95 aa, Thermosynechococcus elongatus
ASVVPQEGQQVTRKHYPNYKVIVLNDDFNTFRHVAACLMKYIPNMTSDRAWELTNQVHYEGQAIVWVGPQEQAELYHEQLFRAGLTMAPLEPEGS

SEQ ID NO: 7874 - protein, 95 aa, Thermosynechococcus elongatus; identical to SEQ ID NO: 93

SEQ ID NO: 7875 - protein, 95 aa, Thermosynechococcus elongatus; identical to SEQ ID NO: 106

SEQ ID NO: 7876 - protein, 95 aa, Thermosynechococcus elongatus
ASVVPQEGQQVTRKHYPNYKVIVLNDDFNTFRHVAACLMKYIPNMTSDRAWELTNQVHYGVRAIVWVGPQEQAELYHEQLLRAGLTMAPLEPEGS

SEQ ID NO: 7877 - protein, 95 aa, Thermosynechococcus elongatus
ASVVPQEGQQVTRKHYPNYKVIVLNDDFNTFRHVAACLMKYIPNMTSDRAWELTNQVHYVGQAIVWVGPQERAELYHEQLLRAGLTMAPLEPEGS

SEQ ID NO: 7878 - protein, 95 aa, Thermosynechococcus elongatus
ASVVPQEGQQVTRKHYPNYKVIVLNDDFNTFRHVAACLMKYIPNMTSDRAWELTNQFHYKGQAIVWVGPQEQAELNHEQLLRAGLTMAPLEPEGS

SEQ ID NO: 7879 - protein, 95 aa, Thermosynechococcus elongatus
ASVVPQEGQQVTRKHYPNYKVIVLNDDFNTFRHVAACLMKYIPNMTSDRAWELTNHVHYKGQAIVWVGPQEQAELNHEQLLRAGLTMAPLEPEGS

SEQ ID NO: 7880 - protein, 95 aa, Thermosynechococcus elongatus
ASVVPQEGQQVTRKHYPNYKVIVLNDDFNTFRHVAACLMKYIPNMTSDRACELTNQVHYKGQAIVWVGPQEQAELNHEQLLRAGLTMAPLEPEGS

SEQ ID NO: 7881 - protein, 95 aa, Thermosynechococcus elongatus
ASVVPQEGQQVTRKHYPNYKVIVLNDDFNTFRHVAACLMKYIPNMTSDIAWELTNQVHYKGQAIVWVGPQEQAELNHEQLLRAGLTMAPLEPEGS

SEQ ID NO: 7882 - protein, 95 aa, Thermosynechococcus elongatus
ASVVPQEGQQVTRKHYPNYKVIVLNDDFNTFRHVAACLMKYIPNMTSYRAWELTNQVHYKGQAIVWVGPQEQAELNHEQLLRAGLTMAPLEPEGS

SEQ ID NO: 7883 - protein, 95 aa, Thermosynechococcus elongatus
ASVVPQEGQQVTRKHYPNYKVIVLNDDFNTFRHVAACLMKYIPNMISDRAWELTNKVHYGGRAIVWVGPQEQAELYHEQLLRAGLTMAPLEPEGS

SEQ ID NO: 7884 - protein, 95 aa, Thermosynechococcus elongatus; identical to SEQ ID NO: 151

SEQ ID NO: 7885 - protein, 95 aa, Thermosynechococcus elongatus
ASVVPQEGQQVTRKHYPNYKVIVLNDDFNTFRHVAACLMKYIPHMTSDRAWELTNQVHYEGQAIVWVGPQEQAELYHEQLWRPGLTMAPLEPEGS

SEQ ID NO: 7886 - protein, 95 aa, Thermosynechococcus elongatus
ASVVPQEGQQVTRKHYPNYKVIVLNDDFNTFRHVAACLMKYLPNMTSDRAWELTNQVHYEGQAIVWVGPQEQAELYHEQLLRAGLTMAPLEPEGS

SEQ ID NO: 7887 - protein, 95 aa, Thermosynechococcus elongatus
ASVVPQEGQQVTRKHYPNYKVIVLNDDFNTFRHVAACLMKCIPNMTSDRAWELTNQVHYKGQAIVWVGPQEQAELNHEQLLRAGLTMAPLEPEGS

SEQ ID NO: 7888 - protein, 95 aa, Thermosynechococcus elongatus
ASVVPQEGQQVTRKHYPNYKVIVLNDDFNTFRHVAACLMNYIPNKTSDRAWELTNQVHYEGQAIVWVGPQEQAELYHEQLLRAGLTMAPLEPEGS

SEQ ID NO: 7889 - protein, 95 aa, Thermosynechococcus elongatus
ASVVPQEGQQVTRKHYPNYKVIVLNDDFNTFRHVAACLMRYIPNMTSDRAWELTNQVHYEGQAIVWVGPQEQAELYHEQLLRAGLTMAPLEPEGS

SEQ ID NO: 7890 - protein, 95 aa, Thermosynechococcus elongatus
ASVVPQEGQQVTRKHYPNYKVIVLNDDFNTFRHVAACLMRYIPNMTSDRAWELTNQVHYEGQAIVWVGPQVQAELYHEQLLRAGLTMAPLEPGGS

SEQ ID NO: 7891 - protein, 95 aa, Thermosynechococcus elongatus
ASVVPQEGQQVTRKHYPNYKVIVLNDDFNTFRHVAACLMEYIPNKTSDRAWELTNQVHYEGQAIVWVGPQEQAELYHEQLLRAGLTMAPLEPEGS

SEQ ID NO: 7892 - protein, 95 aa, Thermosynechococcus elongatus
ASVVPQEGQQVTRKHYPNYKVIVLNDDFNTFRHVAACLIKYIPNKTSDRAWELTNQVHYGGRAIVWVGPQEQAELYHEQLLRAGLTMAPLEPEGS

SEQ ID NO: 7893 - protein, 95 aa, Thermosynechococcus elongatus
ASVVPQEGQQVTRKHYPNYKVIVLNDDFNTFRHVAACLIKYIPNMTSDRAWELTNQVHYKGQAIVWVGPQEQAELNHEQLLRAGLTMAPLEPEGS

SEQ ID NO: 7894 - protein, 95 aa, Thermosynechococcus elongatus
ASVVPQEGQQVTRKHYPNYKVIVLNDDFNTFRHVAACFMKYIPNKTSDRAWELTNQVHYEGQAIVWVGPQEQAELYHEQLLRAGLTMAPLELEGS

SEQ ID NO: 7895 - protein, 95 aa, Thermosynechococcus elongatus
ASVVPQEGQQVTRKHYPNYKVIVLNDDFNTFRHVAACLMKYIPNMTSDRAWELTNQGHYEGQAIVWVGPQVQAELYHEQLLRAGLTMAPLEPEGS

SEQ ID NO: 7896 - protein, 95 aa, Thermosynechococcus elongatus; identical to SEQ ID NO: 86

SEQ ID NO: 7897 - protein, 95 aa, Thermosynechococcus elongatus
ASVVPQEGQQVTRKHYPNYKVIVLNDDFNTFRHVVACLKKYIPNMTSDRAWELTNQVHYVGQAIVWVGPQEQAELYHEQLLRAGLTMAPLEPKGS

SEQ ID NO: 7898 - protein, 95 aa, Thermosynechococcus elongatus
ASVVPQEGQQVTRKHYPNYKVIVLNDDFNTFRHVVACLKKYIPNMISDRAWELTNQVHYEGQAIVWVGPQEQAELYHEQLLRAGLTMAPLEPEGS

SEQ ID NO: 7899 - protein, 95 aa, Thermosynechococcus elongatus
ASVVPQEGQQVTRKHYPNYKVIVLNDDFNTFRHVVACLKKYIPNMISDRAWELTNQVHYGGRAIVWVGPQEQAELYHEHLLRAGLTMAPLEPGGS

SEQ ID NO: 7900 - protein, 95 aa, Thermosynechococcus elongatus
ASVVPQEGQQVTRKHYPNYKVIVLNDDFNTFRHVVACLMKYIPNMTSDRAWELTNQVHYEGQAIVWVGPQEQAELYHEQLLRAGLTMAPLEPEGS

SEQ ID NO: 7901 - protein, 95 aa, Thermosynechococcus elongatus
ASVVPQEGQQVTRKHYPNYKVIVLNDDFNTFRHVSACLMKYIPNMTSDRAWELTNQVHYEGQAIVWVGPQEQAELYHEQLLRAGLTMAPLEPEGS

SEQ ID NO: 7902 - protein, 95 aa, Thermosynechococcus elongatus
ASVVPQEGQQVTRKHYPNYKVIVLNDDFNTFRHVSACLMKYIPNMTSDRAWELTNQVHYEGQAIVWVGPQEQAELYHEQLLRAGLTMAPLEPGGS

SEQ ID NO: 7903 - protein, 95 aa, Thermosynechococcus elongatus
ASVVPQEGQQVTRKHYPNYKVIVLNDDFNTFLHVAACLMKYIPNMTSDRAWELTNQVHYVGLAIVWVGPQEQAELYHEQLLRAGLTMAPLEPEGS

SEQ ID NO: 7904 - protein, 95 aa, Thermosynechococcus elongatus
ASVVPQEGQQVTRKHYPNYKVIVLNDDFNTFLHVVACLKKYIQNMISDRACELTNQVHYGGRSIVWVGPQEQAELYHEQLLRAGLTMAPLEPEGS

SEQ ID NO: 7905 - protein, 95 aa, Thermosynechococcus elongatus
ASVVPQEGQQVTRKHYPNYKVIVLNDDFNTFLHVVACLKKYIPNMISDRAWELTNQVHYGGRAIVWVGPQEQAELYHEQLLRAGLTMAPLEPEGS

SEQ ID NO: 7906 - protein, 31 aa, Thermosynechococcus elongatus
ASVVPQEGQQVTRKHYPNYKVIVLNDDFNTF

SEQ ID NO: 7907 - protein, 31 aa, Thermosynechococcus elongatus; identical to SEQ ID NO: 7906

SEQ ID NO: 7908 - protein, 95 aa, Thermosynechococcus elongatus; identical to SEQ ID NO: 1

SEQ ID NO: 7909 - protein, 31 aa, Thermosynechococcus elongatus; identical to SEQ ID NO: 7906

SEQ ID NO: 7910 - protein, 95 aa, Thermosynechococcus elongatus
ASVVPQEGQQVTRKHYPNYKVIVLNDDFNIFQHVVACLKKYIPNMISGRAWELTNQVHYGGRAIVWVGPQEQAELYHEQLLRAGLTMAPLEPEGS

SEQ ID NO: 7911 - protein, 95 aa, Thermosynechococcus elongatus
ASVVPQEGQQVTRKHYPNYKVIVLNDDFNAFQHVVACLKKYIPNMISDRAWELTNQVHYGGRAIVWVGPQEQAELYHEQLLRAGLTMAPLEPEGS

SEQ ID NO: 7912 - protein, 95 aa, Thermosynechococcus elongatus; identical to SEQ ID NO: 7911

SEQ ID NO: 7913 - protein, 95 aa, Thermosynechococcus elongatus
ASVVPQEGQQVTRKHYPNYKVIVLNDDFNSFQHVVACLKKYIPNMISDRAWELTNQGHYGGRAIVWDGPQEQAELYHEQLLRAGLTLAPLEPEGS

SEQ ID NO: 7914 - protein, 95 aa, Thermosynechococcus elongatus
ASVVPQEGQQVTRKHYPNYKVIVLNDDFNSFQHVVACLMKYIPNMSSDRAWELTNQDHYEGHAIVWVGPQVQAELYHEHLLRAGLTMAPLEPGGS

SEQ ID NO: 7915 - protein, 95 aa, Thermosynechococcus elongatus; identical to SEQ ID NO: 123

SEQ ID NO: 7916 - protein, 95 aa, Thermosynechococcus elongatus
ASVVPQEGQQVTRKHYPNYKVIVLNDDFTTFQHVVACWKKYIPNMISDRAWELTNQVHYGGRAIVWVGPQEQAEFYHEQLLRAGLTMAPLEPEGS

SEQ ID NO: 7917 - protein, 95 aa, Thermosynechococcus elongatus
ASVVPQEGQQVTRKHYPNYKVIVLNDDFSTFQHVVACLKKYTPNMISDRAWELTNQVHYGGRAIVWVGPQEQAELYHEQLLRAGLTMAPLEPEGS

SEQ ID NO: 7918 - protein, 95 aa, Thermosynechococcus elongatus
ASVVPQEGQQVTRKHYPNYKVIVLNDDFSTFQHVVACLKKYIPNMISDRAWELTNQVHYGGRAIVWVGPQEQAELYHEQLLRAGLTMAPLEPEGS

SEQ ID NO: 7919 - protein, 61 aa, Thermosynechococcus elongatus
ASVVPQEGQQVTRKHYPNYKVIVLNDDFSTFQHVVACLKKYIPNMISDRAWELTNQVHYGG

SEQ ID NO: 7920 - protein, 95 aa, Thermosynechococcus elongatus
ASVVPQEGQQVTRKHYPNYKVIVLNDDFSTFRHVAACLMKYIPNMTSDRAWELTNQVHYEGQAIVWVGPQVQAELYHEQLLRAGLTMAPLEPEGS

SEQ ID NO: 7921 - protein, 95 aa, Thermosynechococcus elongatus
ASVVPQEGQQVTRKHYPNYKVIVLNDDFSTFRHVAACLMKYIPNMTSDRAWELTNQVHYEGQAIVWVGPQVQAELYHEQLLRAGLTMAPLEPGGS

SEQ ID NO: 7922 - protein, 95 aa, Thermosynechococcus elongatus
ASVVPQEGQQVTRKHYPNYKVIVLNDDFITFQHVVACLKKYIPNMISDRAWELTNQVHYGGRAIVWVGPQEQAELYHEQLLRAGLTLAPLEPEGS

SEQ ID NO: 7923 - protein, 95 aa, Thermosynechococcus elongatus
ASVVPQEGQQVTRKHYPNYKVIVLNDDFITFQHVVECLKKYIPNMISDRAWELTNQVHYGGRSIVLVCTQEQAELYHEQLLRAGLTMAPLEPEGS

SEQ ID NO: 7924 - protein, 95 aa, Thermosynechococcus elongatus
ASVVPQEGQQVTRKHYPNYKVIVLNDDFITFQHVVECLMKYIPNKTSDRACELTNQVHYEGQAIVWVGPQEQAELYHEQLLRAGLTMAPLEPEGS

SEQ ID NO: 7925 - protein, 95 aa, Thermosynechococcus elongatus
ASVVPQEGQQVTRKHYPNYKVIVLNDDFITFQHVVACLKKYIPNMTSDRAWELTNQVHYEGQAIVWVGPQVQAELYHEQLLRAGLTMAPLEPGGS

SEQ ID NO: 7926 - protein, 95 aa, Thermosynechococcus elongatus
ASVVPQEGQQVTRKHYPNYKVIVLNDDFITFQHVVACLKKYIPNMISDRAWELTNQVHYEGQAIVWVGPQEQAELYHEQLLRAGLTMAPLEPEGS

SEQ ID NO: 7927 - protein, 95 aa, Thermosynechococcus elongatus
ASVVPQEGQQVTRKHYPNYKVIVLNDDFITFQHVVACLKKYIPNMISDRAWELTNQVHYGGRAIVWVGPQVQAELYHEQLLRAGLTMAPLEPEGS

SEQ ID NO: 7928 - protein, 95 aa, Thermosynechococcus elongatus
ASVVPQEGQQVTRKHYPNYKVIVLNDDFITFQHVVACLKKCIPNMISDRAWELTNQVHYGGRAIVWVGPQEQAELYHEQLLRAGLTMAPLEPEGS

SEQ ID NO: 7929 - protein, 59 aa, Thermosynechococcus elongatus
ASVVPQEGQQVTRKHYPNYKVIVLNDDFITFQHVVSCLKKYIPNMISDRAWELTNQVHY

SEQ ID NO: 7930 - protein, 95 aa, Thermosynechococcus elongatus
ASVVPQEGQQVTRKHYPNYKVIVLNDDFITFRHVDACLMKYIPNMTSDRAWELTKQVHYEGQSIVWVGPQEQAELYQEQLFRAGLTIAPLEPEGS

SEQ ID NO: 7931 - protein, 95 aa, Thermosynechococcus elongatus
ASVVPQEGQQVTRKHYPNYKVIVLNDDFITFRHVAACLMKYIPNKTSDRAWELTNQVHYEGQAIVWVGPQEQAELYHEQLLRAGLTMAPLEPEGS

SEQ ID NO: 7932 - protein, 95 aa, Thermosynechococcus elongatus
ASVVPQEGQQVTRKHYPNYKVIVLNDDFISFQHVVACLKKYIPNMISDRAWELTNQVHYGGRAIVWVGPQEQAELYHEQLLRAGLTMAPLEPGGS

SEQ ID NO: 7933 - protein, 95 aa, Thermosynechococcus elongatus
ASVVPQEGQQVTRKHYPNYKVIVLNDDFDTFQHVVACLKKYIPNMISDRAWELTNQVHYEGQAIVWVGPQVQAELYHEQLLRAGLTMAPLEPGGS

SEQ ID NO: 7934 - protein, 95 aa, Thermosynechococcus elongatus
ASVVPQEGQQVTRKHYPNYKVIVLNDDFDTFQHVVACLKKYIPNMISDRAWELTNQVHYGGRAIVWVGPQEQAELYHEQLLRAGLTMAPLEPEGS

SEQ ID NO: 7935 - protein, 95 aa, Thermosynechococcus elongatus
ASVVPQEGQQVTRKHYPNYKVIVLNDDFYTFQHGVACLKKYIPNMISDRAWELTNQVHYGGRAIVWVGPQEQAELYHEQLLRAGLTMAPLEPEGS

SEQ ID NO: 7936 - protein, 95 aa, Thermosynechococcus elongatus
ASVVPQEGQQVTRKHYPNYKVIVLNDDFYTFQHVVACLKKYIPNMISDRDWELTNQVHYEGQAIVWVCPQEQAELYHEQFLRAGLTMAPLEPEGS

SEQ ID NO: 7937 - protein, 95 aa, Thermosynechococcus elongatus
ASVVPQEGQQVTRKHYPNYKVIVLNDDFYTFQHVVACLKKYIPNMISDRAWELTNQVHYRGRAIVWVGPQEQAELYHEQLLRAGLTMAPLEPEGS

SEQ ID NO: 7938 - protein, 95 aa, Thermosynechococcus elongatus
ASVVPQEGQQVTRKHYPNYKVIVLNDDFYTFQHVVACLKKYIPNMISDRAWELTNQVHYEGQAIVWVGPQEQAELYHEQLLRAGLTMAPLEPEGS

SEQ ID NO: 7939 - protein, 95 aa, Thermosynechococcus elongatus
ASVVPQEGQQVTRKHYPNYKVIVLNDDFYTFQHVVACLKKYIPNMISDRAWELTNQVHYGGRAIVWVAPQEQAELYHEQLLRAGLTISPLEPEGS

SEQ ID NO: 7940 - protein, 95 aa, Thermosynechococcus elongatus
ASVVPQEGQQVTRKHYPNYKVIVLNDDFYTFQHVVACLKKYIPNMISDRAWELTNQVHYGGRAIVWVGPQEQAELYHEQLLTAGLTMAPLEPEGS

SEQ ID NO: 7941 - protein, 95 aa, Thermosynechococcus elongatus
ASVVPQEGQQVTRKHYPNYKVIVLNDDFYTFQHVVACLKKYIPNMISDRAWELTNQVHYGGRAIVWVGPQEQAELYHEQLLRAGLTMPPLEPEGS

SEQ ID NO: 7942 - protein, 90 aa, Thermosynechococcus elongatus
ASVVPQEGQQVTRKHYPNYKVIVLNDDFYTFQHVVACLKKYIPNMISDRAWELTNQVHYGGRSIVWVGPQEQAELYHEQLLRAGLTIAPL

SEQ ID NO: 7943 - protein, 95 aa, Thermosynechococcus elongatus
ASVVPQEGQQVTRKHYPNYKVIVLNDDFYTFRHVAACLMKYIPNKTSDRAWELTNQVHYEGQAIFWVCPQVQAELYHEQLLRAGLTMSPLEPGGS

SEQ ID NO: 7944 - protein, 95 aa, Thermosynechococcus elongatus; identical to SEQ ID NO: 1

SEQ ID NO: 7945 - protein, 95 aa, Thermosynechococcus elongatus; identical to SEQ ID NO: 46

SEQ ID NO: 7946 - protein, 95 aa, Thermosynechococcus elongatus; identical to SEQ ID NO: 328

SEQ ID NO: 7947 - protein, 95 aa, Thermosynechococcus elongatus; identical to SEQ ID NO: 1

SEQ ID NO: 7948 - protein, 95 aa, Thermosynechococcus elongatus; identical to SEQ ID NO: 11

SEQ ID NO: 7949 - protein, 95 aa, Thermosynechococcus elongatus; identical to SEQ ID NO: 1

SEQ ID NO: 7950 - protein, 95 aa, Thermosynechococcus elongatus
ASVVPQEGQQVTRKHYPNYKVIVLNDVFNTLQHVVACLKKYIPNMISDRAWELTNQVHYGGRAIVWVGPQEQAELYHEQLLRAGLTMAPLEPEGS

SEQ ID NO: 7951 - protein, 95 aa, Thermosynechococcus elongatus
ASVVPQEGQQVTRKHYPNYKVIVLNDVFNTFQHVVACLKKYIPNMISDRAWELTNQVHYGGRAIVWVGPQEQAELYHEQLLRAGLTMAPLEPEGS

SEQ ID NO: 7952 - protein, 95 aa, Thermosynechococcus elongatus
ASVVPQEGQQVTRKHYPNYKVIVLNDYFNTIQHVVACLKKYIPNMISDRAWELTNQVHYGGRAIVWVGPQEQAELYHEQLLRAGLTMAPLEPEGS

SEQ ID NO: 7953 - protein, 95 aa, Thermosynechococcus elongatus
ASVVPQEGQQVTRKHYPNYKVIVLNDYFNTLQHVVACLKKYIPNMISDRAWELTNQVHYGGRAIVWVGPQEQAELYHEQLLRAGLTMAPLEPEGS

SEQ ID NO: 7954 - protein, 95 aa, Thermosynechococcus elongatus
ASVVPQEGQQVTRKHYPNYKVIVLNDYFNTFQHVVACLKKYIPNMISDRAWELTNQVHYEGQAIVWVGPQVQAELYHEQLLRAGLTMAPLEPGGS

SEQ ID NO: 7955 - protein, 95 aa, Thermosynechococcus elongatus; identical to SEQ ID NO: 639

SEQ ID NO: 7956 - protein, 36 aa, Thermosynechococcus elongatus
ASVVPQEGQQVTRKHYPNYKVIVLNDYFNTFQHLVA

SEQ ID NO: 7957 - protein, 95 aa, Thermosynechococcus elongatus
ASVVPQEGQQVTRKHYPNYKVIVLNDYFNTFRHVAACLMKYIPNMTSDRAWELTNQVHYEGQAIVWVGPQEQAELNHEQLLRAGLTMAPLEPEGS

SEQ ID NO: 7958 - protein, 95 aa, Thermosynechococcus elongatus
ASVVPQEGQQVTRKHYPNYKVIVLNDYFNTFRHVAACLMKYIPNMTSDRAWELTNQVHYEGQAIVWVGPREQAELYHEQLLRVGLTMAPLEPEGS

SEQ ID NO: 7959 - protein, 93 aa, Thermosynechococcus elongatus
ASVVPQEGQQVTRKHYPNYKVIVLNEDFNTFQHVAACLMKYIPNMTSDRAWELTNQVHYEGQAIVWVGPQEQAELYHEQLLRAGLTMAPLEPE

SEQ ID NO: 7960 - protein, 95 aa, Thermosynechococcus elongatus; identical to SEQ ID NO: 1

SEQ ID NO: 7961 - protein, 95 aa, Thermosynechococcus elongatus
ASVVPQEGQQVTRKHYPNYKVIVLNDDFNTFQHVVACLKKYIPNMISDRAWELTNQVYYGGQAIVWVGPQVQAELYHEQLLRAGLTMAPLEPEGS

SEQ ID NO: 7962 - protein, 95 aa, Thermosynechococcus elongatus
ASVVPQEGQQVTRKHYPNYKVIVLNVDFNTFQHVVACLKKYIPNMISDRAWELTNQVHYGGRAIVWVGPQEQAELYHEQLLRAGLTMAPLEPEGS

SEQ ID NO: 7963 - protein, 95 aa, Thermosynechococcus elongatus; identical to SEQ ID NO: 834

SEQ ID NO: 7964 - protein, 95 aa, Thermosynechococcus elongatus; identical to SEQ ID NO: 46

SEQ ID NO: 7965 - protein, 95 aa, Thermosynechococcus elongatus
ASVVPQEGQQVTRKHYPNYKVIVLSDDFNTFQHVVACLKKYIPNMISDRAWELTNQVHYGGRAIVWVGPQEQAELYHEQLLRAGLTMAPLEPEGS

SEQ ID NO: 7966 - protein, 95 aa, Thermosynechococcus elongatus; identical to SEQ ID NO: 7965

SEQ ID NO: 7967 - protein, 95 aa, Thermosynechococcus elongatus
ASVVPQEGQQVTRKHYPNYKVIVLSDDFNTFRHVAACLMKYIPNKTSDRAWELTNQVHYVGQAIVWVGPQERAELYHEQLLRAGLTMAPLEPKGS

SEQ ID NO: 7968 - protein, 95 aa, Thermosynechococcus elongatus
ASVVPQEGQQVTRKHYPNYKVIVLIDDFNTFQHVVACLKKYIPNMMSDRAWELTNQGHYGGRAIVWVGPQEQAELYHEQLLRAGLTMAPLEPEGS

SEQ ID NO: 7969 - protein, 95 aa, Thermosynechococcus elongatus
ASVVPQEGQQVTRKHYPNYKVIVLDDDFNTFQHVVACLKKYIPNMISDRAWELTNQVHYGGRAIVWVGPQEQAELYHEQLLRAGLTMAPLEPEGS

SEQ ID NO: 7970 - protein, 40 aa, Thermosynechococcus elongatus
ASVVPQEGQQVTRKHYPNYKVIVLYDDFNTFQHVVACLKK

SEQ ID NO: 7971 - protein, 95 aa, Thermosynechococcus elongatus
ASVVPQEGQQVTRKHYPNYKVIVLYDDFNTFQHVVACLKKYIPNMISDRAWELTNQVHYRGRAIVWVGPQEQAELYHEQLLRAGLTMSPLEPEGS

SEQ ID NO: 7972 - protein, 95 aa, Thermosynechococcus elongatus
ASVVPQEGQQVTRKHYPNYKVIVLYDDFNTFQHVVACLKKYIPNMISDRAWELTNQVHYEGQAIVWVGPQEQAELYHEQLLRAGLTMAPLEPEGS

SEQ ID NO: 7973 - protein, 80 aa, Thermosynechococcus elongatus
ASVVPQEGQQVTRKHYPNYKVIVLYDDFNTFQHVVACLKKYIPNMISDRAWELTNQVHYGGRAIVWVGPQEQAELYHEQL

SEQ ID NO: 7974 - protein, 95 aa, Thermosynechococcus elongatus; identical to SEQ ID NO: 1186

SEQ ID NO: 7975 - protein, 95 aa, Thermosynechococcus elongatus
ASVVPQEGQQVTRKHYPNYKVIVLYDDFNTFQHVVACLKKYIPNMISDRAWELTNQGHYGGRAIVWVGPQEQAELYHEQLLRAGLTMAPLEPEGS

SEQ ID NO: 7976 - protein, 95 aa, Thermosynechococcus elongatus; identical to SEQ ID NO: 835

SEQ ID NO: 7977 - protein, 95 aa, Thermosynechococcus elongatus
ASVVPQEGQQVTRKHYPNYKVIVFNDDFNTFRHVAACLMKYIPNKTSDRAWELTNQVHYEGQAIVWVGPQEQAELYHEQLLRAGLTMAPLEPEGS

SEQ ID NO: 7978 - protein, 95 aa, Thermosynechococcus elongatus
ASVVPQEGQQVTRKHYPNYKVIVFNDDFNTFRHVAACLMKYIPNMTSDRAWELTNQVHYEGQAIVWVGPQEQAELYHEQLLRAGLTMAPLEPEGS

SEQ ID NO: 7979 - protein, 47 aa, Thermosynechococcus elongatus
ASVVPQEGQQVTRKHYPNYKVIVFERLLQHLQTRCSMIEEVHPKHDF

SEQ ID NO: 7980 - protein, 95 aa, Thermosynechococcus elongatus
ASVVPQEGQQVTRKHYPNYKVIFLNDDFNTLQHVVACLKKYIPNMISDRAWELTNQVHYGGRAIVWVGPQEQAELYHEQLLRAGLTMAPLEPEGS

SEQ ID NO: 7981 - protein, 95 aa, Thermosynechococcus elongatus
ASVVPQEGQQVTRKHYPNYKVIFLNDDFNTFQHVVACLKKYIPNMISDRAWELTNQVHYGGRAIVWVGPQEQAELYHEQLLRAGLTMAPLEPEGS

SEQ ID NO: 7982 - protein, 95 aa, Thermosynechococcus elongatus
ASVVPQEGQQVTRKHYPNYKVMVLNDDFNTFRHVAACLMKYIPNMTSDRAWELTNQVHYKGQAIVWVGPQEQAELNHEQLLRAGLTMAPLEPEGS

SEQ ID NO: 7983 - protein, 95 aa, Thermosynechococcus elongatus; identical to SEQ ID NO: 836

SEQ ID NO: 7984 - protein, 95 aa, Thermosynechococcus elongatus
ASVVPQEGQQVTRKHYPNYKVLVLNDDFNTFQHVVACLKKYIPNMISDRAWELTNQVHYKGQAIVWVGPQEQAELNHEQLLRAGLTMAPLEPEGS

SEQ ID NO: 7985 - protein, 95 aa, Thermosynechococcus elongatus
ASVVPQEGQQVTRKHYPNYKVLVLNDDFNTFRHVAACLMKYIPNMTSDRAWELTNQVHYEGQAIVWVGPQVQAELYHEQLLRAGLTMAPLEPGGS

SEQ ID NO: 7986 - protein, 95 aa, Thermosynechococcus elongatus
ASVVPQEGQQVTRKHYPNYKVLVLNDDFNTFRHVAACLMKYIPNMTSDRAWELTNQVHYEGQAIVWVGPQEQAELYHEQLLRAGLTMAPLEPEGS

SEQ ID NO: 7987 - protein, 95 aa, Thermosynechococcus elongatus
ASVVPQEGQQVTRKHYPNYKVLVLNDVFNTFQHVVACLKKYIPNMISDRAWELTNQVHYGGRAIVWVGPQEQAELYHEQLLRAGLTMAPLEPEGS

SEQ ID NO: 7988 - protein, 95 aa, Thermosynechococcus elongatus
ASVVPQEGQQVTRKHYPNYKVVVLNDDFNTFQHVVACLKKYIPNMISDRAWELTNQVHYKGQAIVWVGPQEQAELNHEQLLRAGLTMAPLEPEGS

SEQ ID NO: 7989 - protein, 95 aa, Thermosynechococcus elongatus
ASVVPQEGQQVTRKHYPNYKVVVLNDDFNTFRHVAACLMKYIPNMTSDRAWELTNQVHYEGQAIVWVGPQEQAELYHEQLLRAGLTMAPLEPEGS

SEQ ID NO: 7990 - protein, 95 aa, Thermosynechococcus elongatus
ASVVPQEGQQVTRKHYPNYKCIVLNDDFNTFQHVVACLKKYIPNMSSDRAWELTNQVHYGGRAIVWVGPQEQAELYHEQLLRAGLTMAPLEPEGS

SEQ ID NO: 7991 - protein, 95 aa, Thermosynechococcus elongatus
ASVVPQEGQQVTRKHYPNYKFIVLNDDLNTFQHVDACLKKYIPNMISDRAWELTNQVHYGGRAIVWVGPQEQAELYHEQLLRAGLTMAPLEPEGS

SEQ ID NO: 7992 - protein, 95 aa, Thermosynechococcus elongatus
ASVVPQEGQQVTRKHYPNYKFIVLNDDFNTLQHFVACLKKYIPNMISDRAWELTNQVHYGGRAIVWVGPQEQAELYHEQLLRAGLTMAPLEPEGS

SEQ ID NO: 7993 - protein, 95 aa, Thermosynechococcus elongatus
ASVVPQEGQQVTRKHYPNYKFIVLNDDFNTFQHVVACLKKYIPKMISDRAWELTNQVHYGGRAIVWVGPQEQAELYHEQLLRAGLTMAPLEPEGS

SEQ ID NO: 7994 - protein, 36 aa, Thermosynechococcus elongatus
ASVVPQEGQQVTRKHYPNYKFIVLNDDFNTFQHVDE

SEQ ID NO: 7995 - protein, 95 aa, Thermosynechococcus elongatus
ASVVPQEGQQVTRKHYPNYKFIVLNDDFNTFQHVVACLKKYIPNMMSDRAWELTNQVHYEGQAIVWVGPQEQAELYHEQLLRAGLTMAPLEPEGS

SEQ ID NO: 7996 - protein, 95 aa, Thermosynechococcus elongatus
ASVVPQEGQQVTRKHYPNYKFIVLNDDFNTFQHVVACLKKYIPNMISDRAWELTNQVHYGGRAIVWVDPQEQAELYHEQLLRAGLTMAPLEPEGS

SEQ ID NO: 7997 - protein, 95 aa, Thermosynechococcus elongatus
ASVVPQEGQQVTRKHYPNYKFIVLNDDFNTFQHVVAWLKKYIPNMISDRAWELTNQVHFGGRAIVWVGPQEQAELYHEQLLRAGLTMATLEPEGS

SEQ ID NO: 7998 - protein, 95 aa, Thermosynechococcus elongatus
ASVVPQEGQQVTRKHYPNYKFIVLNDDFNTFHHVVEFLKKYIPNMISDRAWELTKQVHYEGQAIVWVGPQVQAELYQEQFLRAGLTIAPFEPGGS

SEQ ID NO: 7999 - protein, 95 aa, Thermosynechococcus elongatus
ASVVPQEGQQVTRKHYPNYKFIVLNDDFNTFRHVAACLMKYIPNMTSDRDWELTNQVHYKGQAIVWVGPQEQAELNHEQLLRAGLTMAPLEPEGS

SEQ ID NO: 8000 - protein, 40 aa, Thermosynechococcus elongatus
ASVVPQEGQQVTRKHYPNYNVIVLNDDFNTFKHVVACLKK

SEQ ID NO: 8001 - protein, 95 aa, Thermosynechococcus elongatus
ASVVPQEGQQVTRKHYPNYNVIVLNDDFNTFQHVVACLKKYIPNMISDRAWELTNQVHYGGRAIVWVGPQEQAELYHEQLLRAVLTMAPLEPEGS

SEQ ID NO: 8002 - protein, 95 aa, Thermosynechococcus elongatus
ASVVPQEGQQVTRKHYPNYNVIVLNDDFNTFQHVVACLMKYIPNKTSDRAWELTNQVHYEGQAIVWVGPQEQAELYHEQLLRAGLTMAPLEPEGS

SEQ ID NO: 8003 - protein, 36 aa, Thermosynechococcus elongatus
ASVVPQEGQQVTRKHYPNYNVIVLNDDFNTFRHVAA

SEQ ID NO: 8004 - protein, 40 aa, Thermosynechococcus elongatus
ASVVPQEGQQVTRKHYPNYNVIVLNDDFNTFRHVAACLMK

SEQ ID NO: 8005 - protein, 95 aa, Thermosynechococcus elongatus
ASVVPQEGQQVTRKHYPNYNVIVLNDDFNTFRHVAACLMKYIPNMTSDRAWELTNQVHYKGQAIVWVGPQEQAELYHEQLLRAGLTMAPLEPEGS

SEQ ID NO: 8006 - protein, 95 aa, Thermosynechococcus elongatus
ASVVPQEGQQVTRKHYPNYTVIVLNDDFNTFQHVVACLKKYIPNMISDRAWELTNQVHYGGRAIVWVGPQEQAELNHEQLLRAGLTMAPLEPEGS

SEQ ID NO: 8007 - protein, 95 aa, Thermosynechococcus elongatus
ASVVPQEGQQVTRKHYPNYTVIVLNDDFNTFQHVVACLKKYIPNMISDRAWELTNQVHYGGRAIVWVGPQEQAELYHEQLLRAGLTMAPLEPEGS

SEQ ID NO: 8008 - protein, 95 aa, Thermosynechococcus elongatus
ASVVPQEGQQVTRKHYPNYTVIVLNDDFNTFQHVVACLKKYIPNMISDRAWELTNQVHYGGRAIVWVGPQEQAELYHEQLLRAGLTMAPLEGEGS

SEQ ID NO: 8009 - protein, 95 aa, Thermosynechococcus elongatus
ASVVPQEGQQVTRKHYPNYTVIVLNDDFNTFQHVVACLKKYIPNMISDRAWELTNQVHYGGRAIVWVGPQEQAELYHEQLLRAGLTMAPLEPGGS

SEQ ID NO: 8010 - protein, 95 aa, Thermosynechococcus elongatus
ASVVPQEGQQVTRKHYPNYTVIVLNDDFNTFQHVVACLKKYIPNMISDRAWELTNHVHYGGRAIVWVGPQEQAELYHEQLLRAGLTMAPLEPEGS

SEQ ID NO: 8011 - protein, 95 aa, Thermosynechococcus elongatus
ASVVPQEGQQVTRKHYPNYTVIVLNDDFNTFRHVAACLMKYIPNMTSDRAWELTNQVHYEGQAIVWVGPQVQAELYHEQLLRAGLTMAPLEPGGS

SEQ ID NO: 8012 - protein, 95 aa, Thermosynechococcus elongatus
ASVVPQEGQQVTRKHYPNYRVIVLNDDFNTFQHVVACLKKYIPNMISDRAWELTNQVHYGGRAIVWVGPQEQAELYHEQLLRAGLTMAPLEPKGS

SEQ ID NO: 8013 - protein, 95 aa, Thermosynechococcus elongatus
ASVVPQEGQQVTRKHYPNYQVIVLNDDFNTFRHVAACLMKYIPNMTSDRAWELTNQGHYEGQAIVWVGPQEQAELYPEQLMRAGLTMAPWEPEGS

SEQ ID NO: 8014 - protein, 95 aa, Thermosynechococcus elongatus
ASVVPQEGQQVTRKHYPNYEVRVLNDDFNTFQHVVACLKKYIPHMISDRAWELTNQVHYGGRAIVWVGPQEQAELYHEQLLRAGLTMAPLEPEGS

SEQ ID NO: 8015 - protein, 95 aa, Thermosynechococcus elongatus
ASVVPQEGQQVTRKHYPNYEVIVLNADFNTFQHVVACLKKYIPNMISDRAWELTNQVHYGGRAIVWVGPQEQAELYHEQLLRAGLTMAPLEPEGS

SEQ ID NO: 8016 - protein, 19 aa, Thermosynechococcus elongatus
ASVVPQEGQQVTRKHYPNY

SEQ ID NO: 8017 - protein, 95 aa, Thermosynechococcus elongatus; identical to SEQ ID NO: 1

SEQ ID NO: 8018 - protein, 95 aa, Thermosynechococcus elongatus
ASVVPQEGQQVTRKHYPNYKVIVLNDDFNTFQHVVACLKKYIPNMISDRAWELTNEVHYGGRAIVWVGPQEQAELYHEQLLRAGLTMAPLEPEGS

SEQ ID NO: 8019 - protein, 95 aa, Thermosynechococcus elongatus
ASVVPQEGQQVTRKHYPNYKVIVLNDDFNTFQHFVACLKKYIPNMISDRDWELTKQVHYGGRAIVWVGPQEQAELYHEQLLRAGLTMAPLEPEGS

SEQ ID NO: 8020 - protein, 95 aa, Thermosynechococcus elongatus
ASVVPQEGQQVTRKHYPNSKDIVLNDDFNTFRDDAACLMKYIPNMTSDRAWELTNHVHYKCQAIVWVGPQEQAELNHDQVWRAGLTMAPLEPEGS

SEQ ID NO: 8021 - protein, 95 aa, Thermosynechococcus elongatus
ASVVPQEGQQVTRKHYPNSKGIVLNDDVNTFQHVVACMKKYIPNMISDRAWELTNQVHDGGRAIVWVGPQEQAELYHEQLLRAGLTMAPLEPEGS

SEQ ID NO: 8022 - protein, 95 aa, Thermosynechococcus elongatus
ASVVPQEGQQVTRKHYPNSKVRVLNDDFNTFQHVVACLKKYIPNMISDRAWELTNQVHYGGRAIVWVGPQEQAELYHEQLLRAGLTMAPLEPEGS

SEQ ID NO: 8023 - protein, 95 aa, Thermosynechococcus elongatus
ASVVPQEGQQVTRKHYPNSKVIVLNDDFNTFQHVVACLKKYIPNMISDRAWELTNQVHYGGRAIVWVGPQEQAELYHEQLLRAGLTMAPLEPEGS

SEQ ID NO: 8024 - protein, 59 aa, Thermosynechococcus elongatus
ASVVPQEGQQVTRKHYPNSKVIVLNDDFNTFQHVVACLKKYIPNMISDRAWELTNQVLY

SEQ ID NO: 8025 - protein, 95 aa, Thermosynechococcus elongatus
ASVVPQEGQQVTRKHYPNSKVIVLNDDFNTFRHVAACLMKYIPNKTSDRAWELTNQVHYEGQAIVWVGPQEQAELYHEQLLRAGLTMAPLEPEGS

SEQ ID NO: 8026 - protein, 95 aa, Thermosynechococcus elongatus
ASVVPQEGQQVTRKHYPNSKVIVLNDDFNTFRHVAACLMKYIPNMTSDRAWELTNQVHYKGQAIVWVGPREQAELNHEQLLRAGLTMAPLEPEGS

SEQ ID NO: 8027 - protein, 95 aa, Thermosynechococcus elongatus
ASVVPQEGQQVTRKHYPTYKVIVLNDDFNTFQHVVACLKKDIPNMISDRAWDLTNQVHDGGRAIAWVRPQEQAELYHEQLLRAGLTMAPLEPEGS

SEQ ID NO: 8028 - protein, 95 aa, Thermosynechococcus elongatus
ASVVPQEGQQVTRKHYPTYKVIVLNDDFNTFRHVAACLMKYIPNMTFDRAWELTNQVHYKGQAIVWVGPQEQAELNHEQLLRAGLTMAPLEPGGS

SEQ ID NO: 8029 - protein, 95 aa, Thermosynechococcus elongatus
ASVVPQEGQQVTRKHYPSYKVIVLNDDFNTFQHVVACLKKYIPNMISDRAWELTNQVHYGGRAIVWVGPQEQAELNHEQLLRAGLTMAPLEPEGS

SEQ ID NO: 8030 - protein, 95 aa, Thermosynechococcus elongatus
ASVVPQEGQQVTRKHYPSYKVIVLNDDFNTFQHVVACLKKYIPNMISDRAWELTNQVHYGGRAIVWVGPQEQAELYHEQLLRAGLTMAPLEPEGS

SEQ ID NO: 8031 - protein, 95 aa, Thermosynechococcus elongatus
ASVVPQEGQQVTRKHYPIYKVIVLNDDFNTFRHVAACLMKYIPNMTSDRAWELTNQVHYEGQAIVWVGPQEQAELYHEQLLRAGLTMAPLEPEGS

SEQ ID NO: 8032 - protein, 95 aa, Thermosynechococcus elongatus
ASVVPQEGQQVTRKHYPIYKVIVLNDDFNTFQHVVACLKKYIPNMISDRAWELTNQVHYGGRAIVWVGPQEQAELYHEQLLRAGLTMAPLEPEGS

SEQ ID NO: 8033 - protein, 95 aa, Thermosynechococcus elongatus
ASVVPQEGQQVTRKHYPIYKVIVLNDDFNTFRHVAACLMKYIPNMTSDRAWELTNQVHYEGQAIVWVGPQVQAELYHEQLLRAGLTLAPLEPGGS

SEQ ID NO: 8034 - protein, 95 aa, Thermosynechococcus elongatus
ASVVPQEGQQVTRKHYPIYKVLVLNDDFNTFQHVVACVKKYIPNMISDRAWELTNQVHYGGRAIVWVGPHEQAELYHEHLLRAGLTMAPLEPEGS

SEQ ID NO: 8035 - protein, 95 aa, Thermosynechococcus elongatus
ASVVPQEGQQVTRKHYPHYKVIVLNDDFNTFQHVVACLKKYIPNMISDRAWELTNQVHYGGRAIVWVGPQEQAELYHEQLLRVGLTMAPLEPEGS

SEQ ID NO: 8036 - protein, 95 aa, Thermosynechococcus elongatus
ASVVPQEGQQVTRKHYPDYKVIVLNDDFNTFQHVVACLKKYIPNMISDRAWELTNQVHYGGRAIVWVGPQEQAELYHEQLLRAGLTMAPLEPEGS

SEQ ID NO: 8037 - protein, 95 aa, Thermosynechococcus elongatus
ASVVPQEGQQVTRKHYPYYKVIVLNDDFNTFQHVVACLKKYIPNMISDRAWELTNQVHYGGRAIVWVGPQEQAELYHEQLLRAGLTMAPLEPEGS

SEQ ID NO: 8038 - protein, 95 aa, Thermosynechococcus elongatus; identical to SEQ ID NO: 1

SEQ ID NO: 8039 - protein, 95 aa, Thermosynechococcus elongatus
ASVVPQEGQQVTRKHYPNYKVIVLNEDFNTFRHVAACLMKYIPNMTSDRAWELTNQVHYKGQAIVWVGPQEQAELNHEQLLRAGLTMAPLEPEGS

SEQ ID NO: 8040 - protein, 90 aa, Thermosynechococcus elongatus
ASVVPQEGQQVTRKHYPNYKVIVLNYDFNTFQHVVACLKKYIPNMISDRAWELTNQVHYGGRAIVCVGPQEQAELYHEQLLRAGLTMAPL

SEQ ID NO: 8041 - protein, 95 aa, Thermosynechococcus elongatus; identical to SEQ ID NO: 811

SEQ ID NO: 8042 - protein, 95 aa, Thermosynechococcus elongatus
ASVVPQEGQQVTRKHYRNYKVIVLNDDFNTFQHVVACLKKYIPNMISDRAWELTNQVHYGGRAIVWVGPQEQAELYHEQLLRAGLTMAPLEPEGS

SEQ ID NO: 8043 - protein, 95 aa, Thermosynechococcus elongatus
ASVVPQEGQQVTRKHYSNYKVIVLNDDFNTFQHVAACLMKYIPNMTSDRAWELTNQVHYEGQAIVWVGPQEQAELYHKQLLRAGLTMAPLEPEGS

SEQ ID NO: 8044 - protein, 95 aa, Thermosynechococcus elongatus
ASVVPQEGQQVTRKHYSNYKVIVLNDDFNTFQHVAACLMKYIPNMTSDRAWELTNQVHYEGQAIVWVGPQEQAELYHEQLLRAGLTMAPLEPEGS

SEQ ID NO: 8045 - protein, 95 aa, Thermosynechococcus elongatus
ASVVPQEGQQVTRKHYSNYKVIVLNDDFNTFQHVVACLKKYIPNMISDRAWELTNQVHYGGRAIVWVGPQEQAELYHEQLLRAGLTMAPLEPEGS

SEQ ID NO: 8046 - protein, 70 aa, Thermosynechococcus elongatus
ASVVPQEGQQVTRKHYSNYKVIVLNDDFNTFQHVVACLKKYIPNMISDRAWELTNQVHYGGRAIVWVGPQ

SEQ ID NO: 8047 - protein, 95 aa, Thermosynechococcus elongatus
ASVVPQEGQQVTRKHFPNYKVIVLNDDFNTFQHVVACLKKYIPNMISDRAWELTNQVHYGGRAIVWVGPQEQAELYHEQLLRAGLTMAPLEPEGS

SEQ ID NO: 8048 - protein, 95 aa, Thermosynechococcus elongatus; identical to SEQ ID NO: 6710

SEQ ID NO: 8049 - protein, 95 aa, Thermosynechococcus elongatus; identical to SEQ ID NO: 1

SEQ ID NO: 8050 - protein, 95 aa, Thermosynechococcus elongatus
ASVVPQEGQQVTRKRYPNYKVIVLNDDFNTFRHVAACLMKYIPNMTSDRAWELTNQVHYEGQAIDWVGPQVQAELYHEQLLRAGLTMAPLEPGGS

SEQ ID NO: 8051 - protein, 95 aa, Thermosynechococcus elongatus; identical to SEQ ID NO: 380

SEQ ID NO: 8052 - protein, 36 aa, Thermosynechococcus elongatus
ASVVPQEGQQVTRKLYPNYNVIVLNDDFNTLQHFVA

SEQ ID NO: 8053 - protein, 95 aa, Thermosynechococcus elongatus
ASVVPQEGQQVTRKLYANYKVIVLNDDFNTFQHVVACLKKYIPNMISDRAWELTNQVHYGGRAIVWVGPQEQAELYHEQLLRAGLTMAPLEPEGS

SEQ ID NO: 8054 - protein, 95 aa, Thermosynechococcus elongatus
ASVVPQEGQQVTRKLYANYKVIVLNDDFNTFRHVAACLMKYIPNMTSDRAWELTNQVHYEGQAIVWVGPQEQAELYHEQLLRAGLTMAPLEPEGS

SEQ ID NO: 8055 - protein, 95 aa, Thermosynechococcus elongatus
ASVVPQEGQQVTRKDYPNYKVIVLNDDFNTFQHVVACLKKYIPNMISDRAWELTNQVHYGGRAIVWVGPQEQAELYHEQLLRAGMTMAPLEPEGS

SEQ ID NO: 8056 - protein, 95 aa, Thermosynechococcus elongatus
ASVVPQEGQQVTRKYYPNYKVIVLNDDFNTFQHVVACLKKYIPNMISDRAWELTNQVHYEGQAIVWVGPQEQAELYHEQLLRAGLTMAPLEPEGS

SEQ ID NO: 8057 - protein, 95 aa, Thermosynechococcus elongatus
ASVVPQEGQQVTRKYYPNYKVIVLNDDFNTFQHVVACLKKYIPNMISDRAWELTNQVHYGGRAIVWVGPQEQAELYHEQLLRAGLTMAPLEPEGS

SEQ ID NO: 8058 - protein, 95 aa, Thermosynechococcus elongatus
ASVVPQEGQQVTRNHYQNYKVIVLNDDFNTFQHVVACLKKYIPNMISDRAWELTNQVHYGGRAIVWVGPQEQAELYHEQLLRAGLTMAPLEPEGS

SEQ ID NO: 8059 - protein, 95 aa, Thermosynechococcus elongatus
ASVVPQEGQQVTRNHYPNYKVIVLNDDFNTIQHDVACFKKYIPNMISDRACELTNQVLFGGRAIVCVGPQELADLYLVQLLRAGLTMAPLEAEGS

SEQ ID NO: 8060 - protein, 95 aa, Thermosynechococcus elongatus
ASVVPQEGQQVTRNHYPNYKVIVLNDDFNTFQHVVACLKKYIPNMISDRAWELTNQVHYKGQAIVWVGPQEQAELNHEQLLRAGLTMAPLEPEGS

SEQ ID NO: 8061 - protein, 95 aa, Thermosynechococcus elongatus
ASVVPQEGQQVTRNHYPNYKVIVLNDDFNTFQHVVACLKKYIPNMISDRAWELTNQVHYEGQAIVWVGPQEQAELYHEQLLRAGLTMAPLEPEGS

SEQ ID NO: 8062 - protein, 95 aa, Thermosynechococcus elongatus; identical to SEQ ID NO: 306

SEQ ID NO: 8063 - protein, 95 aa, Thermosynechococcus elongatus
ASVVPQEGQQVTRTHYTNYKVIVLNDDFNTFQHVVACLKKYIPNMISDRAWELTNQVHYGGRAIVWVGPQEQAELYHEQLLRAGLTMAPLEPEGS

SEQ ID NO: 8064 - protein, 95 aa, Thermosynechococcus elongatus
ASVVPQEGQQVTRTHYPNYKVIVLNDDFNTFRHVAACLMKYIPNKTSDRAWELTNQVHYEGQAIVWVGPQEQAELYHEQLLRAGLTMAPLEPEGS

SEQ ID NO: 8065 - protein, 95 aa, Thermosynechococcus elongatus
ASVVPQEGQQVTRTHYPNYKVIVLNDDFNTFRHVAACLMKYIPNMTSDRAWELTNEVHYKGQAIVWVGPQEQAELNHEQLLRAGLTMAPFEPEGS

SEQ ID NO: 8066 - protein, 95 aa, Thermosynechococcus elongatus
ASVVPQEGQQVTRTHYPNYTVIVLNDDFNTFQHGVACLKKYIPNMISDRAWELTNQVHYGGRAIVWVGPQEQAELYHEQLLRAGLTMAPLEPEGS

SEQ ID NO: 8067 - protein, 95 aa, Thermosynechococcus elongatus
ASVVPQEGQQVTRTHYPNYTVIVLNDDFNTFQHVVACLKKYIPNMISDRAWELTNQVHYGGRAIVWVGPQEQAELYHEQLSRAGLTMAPLEPEGS

SEQ ID NO: 8068 - protein, 95 aa, Thermosynechococcus elongatus
ASVVPQEGQQVTRRHYPNYKVIVLNDDFNTFQHVVACLKKYIPNMISDRAWELTNQVHYGGRAIVWVGPQEQAELYHEQLLRAGLTMAPLEPEGS

SEQ ID NO: 8069 - protein, 95 aa, Thermosynechococcus elongatus
ASVVPQEGQQVTRRHYPNYKVIVLNDDFNTFRHVAACLMKYIPNMTSDRAWELTNQVHYEGQAIVWVGPQEQAELYHEQLLRAGLTMAPLEPEGS

SEQ ID NO: 8070 - protein, 95 aa, Thermosynechococcus elongatus
ASVVPQEGQQVTRMHYQNYKVIVLNDDFNTFQHVVACLKKYIPNMISDRAWELTNQVHYEGQAIVWVGPQEQAELYHEQLLRAGLTMAPLEPEGS

SEQ ID NO: 8071 - protein, 95 aa, Thermosynechococcus elongatus
ASVVPQEGQQVTRMHYPNYKVIVLNDDFNTFQHVVACLKKYIPNMISDRAWELTNQVHYGGRAIVWVGPQEPAELYHEQLLRAGLTMAPLEPEGS

SEQ ID NO: 8072 - protein, 95 aa, Thermosynechococcus elongatus
ASVVPQEGQQVTRMHYPNYKVIVLNDDFNTFQLVVACLKKYIPNMISDRAWELTNQVHYGGRAIVWVGPQEQAELYHEQLLRAGLTMAPLEPEGS

SEQ ID NO: 8073 - protein, 95 aa, Thermosynechococcus elongatus
ASVVPQEGQQVTRMRYANYKVIVLNDDFNTFQHVVACLKKYIPNMISDRAWELTNQVHYGGRAIVWVGPQEQAELYHEQLLRAGLTMAPLEPEGS

SEQ ID NO: 8074 - protein, 36 aa, Thermosynechococcus elongatus
ASVVPQEGQQVTRMLYPNYKVIVLNDDFNTFKHFVA

SEQ ID NO: 8075 - protein, 95 aa, Thermosynechococcus elongatus
ASVVPQEGQQVTRQHYPNYKVIVLNDDFNTFQHVVACLKKYIPNMISDRAWELTNQVHYEGQAIVWVGPQVQAELYHEQLLRAGLTMAPLEPGGS

SEQ ID NO: 8076 - protein, 95 aa, Thermosynechococcus elongatus
ASVVPQEGQQVTRQHYPNYKVIVLNDDFNTFQHVVACLKKYIPNMISDRAWELTNQVHYGGRAIVWVGPQEQAELYHEQLLRAGLTMAPLEPEGS

SEQ ID NO: 8077 - protein, 95 aa, Thermosynechococcus elongatus
ASVVPQEGQQVTRQHYPNYKVIVLNDDFNTFQHVVACLKKYIPHMISDRAWELTNQVHYGGRAIVWVGPQEQAELYHEQLLRAGLTMAPLEPEGS

SEQ ID NO: 8078 - protein, 95 aa, Thermosynechococcus elongatus
ASVVPQEGQQVTRQHYPNYKVIVLNDDFNTFQHFVACLKKYIPNMISDRAWELTNQVHYGGRAIVWVGPQEQAELYHEQLLRAGLTMAPLEPEGS

SEQ ID NO: 8079 - protein, 95 aa, Thermosynechococcus elongatus
ASVVPQEGQQVTRQHYPNYKVIVLNDDFNTFRHVAACLMKYIPNMTSDRAWELTNQVHYEGQAIVWVGPQEQAELYHEQLLRAGLTMAPLEPEGS

SEQ ID NO: 8080 - protein, 95 aa, Thermosynechococcus elongatus
ASVVPQEGQQVTRQHYPHSKGRVLNDDVNTFQHVVACLKKYIPHMISDRAWELTNQVHYEGQAIVWVGPQEQAELYPEQLLRTGLTMAPLEPEGS

SEQ ID NO: 8081 - protein, 95 aa, Thermosynechococcus elongatus
ASVVPQEGQQVTREHYPNYKVIVLNDDFNTFRHVAACLMKYIPNMTSDRAWELTNQVHYEGQAIVWVGPQVQAELYHEQLLRAGLTMAPLEPGGS

SEQ ID NO: 8082 - protein, 13 aa, Thermosynechococcus elongatus
ASVVPQEGQQVTR

SEQ ID NO: 8083 - protein, 13 aa, Thermosynechococcus elongatus
ASVVPQEGQQVTR

SEQ ID NO: 8084 - protein, 95 aa, Thermosynechococcus elongatus; identical to SEQ ID NO: 1

SEQ ID NO: 8085 - protein, 95 aa, Thermosynechococcus elongatus; identical to SEQ ID NO: 837

SEQ ID NO: 8086 - protein, 95 aa, Thermosynechococcus elongatus
ASVVPQEGQQVTSKNYPNYKVIVLNDYFNTFRHVDACLMKYIPNMTSDRAWELTNQVHYKGQAIVWVGPQVQAELYHEQLLRAGLTMAPLEPGGS

SEQ ID NO: 8087 - protein, 95 aa, Thermosynechococcus elongatus
ASVVPQEGQQVTSKHYPNYKVRVLNEDFNTFQHVVAGMKKYIPNMISDRAWELTNQVHYGGRAIVWVGPQEQAELYHEQLLRAGLTMAPLEPEGS

SEQ ID NO: 8088 - protein, 95 aa, Thermosynechococcus elongatus
ASVVPQEGQQVTSKHYPNYKVIELNDDFNTFQHVVACLKKYIPNMISDRAWELTNQVHYGGRAIVWVGPQEQAELYHEQLLRAGLTMAPLEPEGS

SEQ ID NO: 8089 - protein, 95 aa, Thermosynechococcus elongatus
ASVVPQEGQQVTSKHYPNYKVIVLNDDFNTFQHVVACLKKYIPNMISDRAWELTNQVHYGGRAIVWVGPQEQAELYHEQLLRAGLTMAPLEPEGS

SEQ ID NO: 8090 - protein, 95 aa, Thermosynechococcus elongatus; identical to SEQ ID NO: 838

SEQ ID NO: 8091 - protein, 95 aa, Thermosynechococcus elongatus
ASVVPQEGQQVTSKHYPNYKVIVLNDVFNSFQHVVACLKKYIPTMISDRAWELTNQVHYGGRAIVWVGPQEQAELYHDQLLRAGLTMAPLEPEGS

SEQ ID NO: 8092 - protein, 95 aa, Thermosynechococcus elongatus
ASVVPQEGQQVTSKHYPNYKVIVLNVDFNTFQHVVACLKKYIPNMISDRAWELTNQVHYGGRAIVWVGPQEQAELYHEQLLRAGLTMAPLEPEGS

SEQ ID NO: 8093 - protein, 95 aa, Thermosynechococcus elongatus
ASVVPQEGQQVTSKHYPNYKVIVLYDDFNTFQHVVACLKKYIPNMISDRAWELTNQLHYGGRAIVWVGPQEQAELYHEQLLRAGLTMAPLEPEGS

SEQ ID NO: 8094 - protein, 95 aa, Thermosynechococcus elongatus
ASVVPQEGQQVTIKHYPNYKVIVLNDDFYTIKHLVACLKKYIQIMISDRAWELTNHVLYVGRAIVWVGPQEQAELYHEQLLRAGLTMAPLEREGS

SEQ ID NO: 8095 - protein, 40 aa, Thermosynechococcus elongatus; identical to SEQ ID NO: 1121

SEQ ID NO: 8096 - protein, 95 aa, Thermosynechococcus elongatus; identical to SEQ ID NO: 423

SEQ ID NO: 8097 - protein, 95 aa, Thermosynechococcus elongatus; identical to SEQ ID NO: 1

SEQ ID NO: 8098 - protein, 40 aa, Thermosynechococcus elongatus; identical to SEQ ID NO: 1121

SEQ ID NO: 8099 - protein, 95 aa, Thermosynechococcus elongatus; identical to SEQ ID NO: 326

SEQ ID NO: 8100 - protein, 95 aa, Thermosynechococcus elongatus; identical to SEQ ID NO: 22

SEQ ID NO: 8101 - protein, 95 aa, Thermosynechococcus elongatus; identical to SEQ ID NO: 274

SEQ ID NO: 8102 - protein, 95 aa, Thermosynechococcus elongatus; identical to SEQ ID NO: 6700

SEQ ID NO: 8103 - protein, 95 aa, Thermosynechococcus elongatus; identical to SEQ ID NO: 20

SEQ ID NO: 8104 - protein, 95 aa, Thermosynechococcus elongatus
ASVVPQEGQQVTRTHYPNYKVIVLNDDFNTFQHVVACLKKYIPNMISDRAWELTNQVHYGGRAIVWVGPQEQAELYHEQLLRAGLTMAPLEPEGS

SEQ ID NO: 8105 - protein, 95 aa, Thermosynechococcus elongatus
ASVVPQEGQQVTGKHYPNYKVIVLNDDFNTFQHVVACLKKYIPNMISDRAWELTNQVHYGGRAIVWVGPQEQAELYHEQLLRAGLTMAPLEPEGS

SEQ ID NO: 8106 - protein, 95 aa, Thermosynechococcus elongatus
ASVVPQEGQQVSRKHYPNYKVIVLNDDFNTFQHVVACLKKYIPNMISDRAWELTNQVHYEGQAIVWVGPQVQAELYHEQLLRAGLTMAPLEPGGS

SEQ ID NO: 8107 - protein, 95 aa, Thermosynechococcus elongatus
ASVVPQEGQQVSRKHYPNYKVIVLNDDFNTFQHVVACLKKYIPNMISDRAWELTNQVHYGGRAIVWVGPQEQAELYHKQLLRAGLTMAPLEPGGS

SEQ ID NO: 8108 - protein, 95 aa, Thermosynechococcus elongatus
ASVVPQEGQQVIRKHYPNYKVIVLNDDFNTFRHVAACLMKYIPNMTSDRAWELTNQVHYEGQAIVWVGPQEQAELYHEQLLRAGLTMAPLEPEGS

SEQ ID NO: 8109 - protein, 95 aa, Thermosynechococcus elongatus; identical to SEQ ID NO: 193

SEQ ID NO: 8110 - protein, 92 aa, Thermosynechococcus elongatus
ASVVPQEGQQVPRKHYPNYKVIVLNDDFNTIQHVVACLKKYIPNMISDRAWELTNQVHYGGRAIVWVGPQEQAELYHEQLLRAGLTMAPLEQ

SEQ ID NO: 8111 - protein, 95 aa, Thermosynechococcus elongatus
ASVVPQEGQQVPRKHYPNYKVIVLNDDFNTFQHVVACLKKYIPNMISDRAWELTNQVHYEGQAIVWVGPQVQAELYHEQLLRAGLTMAPLEPGGS

SEQ ID NO: 8112 - protein, 95 aa, Thermosynechococcus elongatus; identical to SEQ ID NO: 193

SEQ ID NO: 8113 - protein, 95 aa, Thermosynechococcus elongatus
ASVVPQEGQQVPRKHYPNYKVIVLNDDFNTFRHVAACLKKYIPNMISDRAWELTNQVHYGGRAIVWVGPQEQAELYHEQLLRAGLTMAPLEPEGS

SEQ ID NO: 8114 - protein, 95 aa, Thermosynechococcus elongatus
ASVVPQEGQQVPRKHYPNYKVIVLNDDFNTFRHVAACLMKYIPNMTSDRAWELTNQVHYEGQAIVWVGPQEQAELYHEQLLRAGLTMAPLEPEGS

SEQ ID NO: 8115 - protein, 95 aa, Thermosynechococcus elongatus
ASVVPQEGQQVPRKHYPNYKVIVLYDDFNTFQHVVACLKKYIPNMISDRAWELTNQVHYGGRAIVWVGPQEQAELYHEQVLRAGLTMAPLEPEGS

SEQ ID NO: 8116 - protein, 95 aa, Thermosynechococcus elongatus
ASVVPQEGQQVPRKHYPNYKVIVLYDDFNTFQHVVACLKKYIPNMISDRAWELTNQVHYGGRAIVWVGPQEQAELYHEQLLRAGLTMAPLEPEGS

SEQ ID NO: 8117 - protein, 95 aa, Thermosynechococcus elongatus
ASVVPQEGQQVARKHYPNYKGIVLNDDFNTFRHVAACLMKYIPNMTSDRAWELTNQVHYEGQAIVWVGPQVQAELYHEQLLRAGLTMAPLEPGGS

SEQ ID NO: 8118 - protein, 95 aa, Thermosynechococcus elongatus
ASVVPQEGQQVARKHYPNYKVIDLNDDFNTFRHVAACLMKYIPNMTSDRAWELTNQVHYKGQAIVWVGPQEQAELNHEQLLRAGLTMAPLEPEGS

SEQ ID NO: 8119 - protein, 95 aa, Thermosynechococcus elongatus; identical to SEQ ID NO: 84

SEQ ID NO: 8120 - protein, 95 aa, Thermosynechococcus elongatus
ASVVPQEGQQVARKHYPNYKVIVLNDDFNTFQHVAACLKKYIPNMISDRAWELTNQVHYGGRAIVWVCPQEQAELYHEQLLRAGLTMAPLEPEGS

SEQ ID NO: 8121 - protein, 95 aa, Thermosynechococcus elongatus
ASVVPQEGQQVARKHYPNYKVIVLNDDFNTFQHVAACLMKYIPNMTSDRAWELTNQVHYEGQAIVWVGPQVQAELYHEQLLRAGLTMAPLEPGGS

SEQ ID NO: 8122 - protein, 95 aa, Thermosynechococcus elongatus; identical to SEQ ID NO: 2021

SEQ ID NO: 8123 - protein, 95 aa, Thermosynechococcus elongatus
ASVVPQEGQQVARKHYPNYKVIVLNDDFNTFRHVAACLMKYIPNKTSDRAWELTNQVHYEGQAIVWVGPQEQAELYHEQLLRAGLTMAPLEPEGS

SEQ ID NO: 8124 - protein, 95 aa, Thermosynechococcus elongatus
ASVVPQEGQQVARKHYPNYKVIVLNDDFNTFRHVAACLMKYIPNKTSDRAWELTNQVHYVGQAIVWVGPQERAELYHEQLLRAGLTMAPLEPEGS

SEQ ID NO: 8125 - protein, 95 aa, Thermosynechococcus elongatus
ASVVPQEGQQVARKHYPNYKVIVLNDDFNTFRHVAACLMKYIPNMTSDRAWELTNQGHYEGQAIVWVGPQVQAELYHEQLLRAGLTMAPLEPGGS

SEQ ID NO: 8126 - protein, 95 aa, Thermosynechococcus elongatus
ASVVPQEGQQVARKHYPNYKVIVLNDDFNTFRHVAACLMKYIPNMTSDRAWELTNQVHYEGQAIVWVGPQEQAELYHEQLLRTGLTMAPLEPEGS

SEQ ID NO: 8127 - protein, 95 aa, Thermosynechococcus elongatus; identical to SEQ ID NO: 84

SEQ ID NO: 8128 - protein, 95 aa, Thermosynechococcus elongatus
ASVVPQEGQQVARKHYPNYKVIVLNDDFNTFRHVAACLMKYIPNMTSDRAWELTNQVHYEGQAIVWVGPQVQAELYHEQLLRAGLTMAPLEAGGS

SEQ ID NO: 8129 - protein, 95 aa, Thermosynechococcus elongatus
ASVVPQEGQQVARKHYPNYKVIVLNDDFNTFRHVAACLMKYIPNMTSDRAWELTNQVHYEGQAIVWVGPREQAELYHEQLLRVGLTMAPLEPEGS

SEQ ID NO: 8130 - protein, 75 aa, Thermosynechococcus elongatus
ASVVPQEGQQVARKHYPNYKVIVLNDDFNTFRHVAACLMKYIPNMTSDRAWELTNQVHYGGRAIVWVGPQEQAEL

SEQ ID NO: 8131 - protein, 95 aa, Thermosynechococcus elongatus; identical to SEQ ID NO: 1841

SEQ ID NO: 8132 - protein, 95 aa, Thermosynechococcus elongatus; identical to SEQ ID NO: 1841

SEQ ID NO: 8133 - protein, 95 aa, Thermosynechococcus elongatus; identical to SEQ ID NO: 84

SEQ ID NO: 8134 - protein, 95 aa, Thermosynechococcus elongatus; identical to SEQ ID NO: 495

SEQ ID NO: 8135 - protein, 95 aa, Thermosynechococcus elongatus
ASVVPQEGQQVARKHYPNYKVIVLNDDFNTFRHVVACLKKYIPNMISDRAWELTNQVHYGGRAIVWVGPQEQAELYHEQLLRAGLTMAPLEPEGS

SEQ ID NO: 8136 - protein, 95 aa, Thermosynechococcus elongatus
ASVVPQEGQQVARKHYPNYKVIVLNDDFYTFQHVVACLKKYIPNMISDRAWELTNQVHYGGRAIVWVGPQVQAELYHEQLLRAGLTMAPLEPGGS

SEQ ID NO: 8137 - protein, 95 aa, Thermosynechococcus elongatus; identical to SEQ ID NO: 2019

SEQ ID NO: 8138 - protein, 95 aa, Thermosynechococcus elongatus
ASVVPQEGQQVSRKHYPNYKVIVLNDDFNTFRHVAACLMKYIPNMTSDRAWELTNQVHYEGQAIVWVGPQVQAELYHEQLLRAGLTMAPLEPGGS

SEQ ID NO: 8139 - protein, 95 aa, Thermosynechococcus elongatus
ASVVPQEGQQLTRKHYPNYKVIVLKDDINTDQHYVAFMKKYIPNMISDRAWELTNQVHYGGRAIVWVGPQEQAELYHEQLLRAGLTMAPLEPEGS

SEQ ID NO: 8140 - protein, 59 aa, Thermosynechococcus elongatus
ASVVPQEGQQFTRKHYTNYKVIVLNDDFNTFQHVVECLKKYIPNMISDRAWEFTNQFHY

SEQ ID NO: 8141 - protein, 95 aa, Thermosynechococcus elongatus
ASVVPQEGQQFTRKHYPNYKVIVLNDDFNTFQHVVACLKKYIPNMISDRAWELTNQVHYGGRAIVWVGPQEQAELYHEQLLRAGLTMAPLEPEGS

SEQ ID NO: 8142 - protein, 95 aa, Thermosynechococcus elongatus
ASVVPQEGQHDTRKHYPNYKVIVLNDDFNTFRHVAACLMKYIPNMTSDRAWELTNQVHYEGQAIVWVGPQEQAELYHEQLLRAGLTMAPLEPEGS

SEQ ID NO: 8143 - protein, 95 aa, Thermosynechococcus elongatus
ASVVPQEGQHVTRKHYPNYKGIVLNDDFNTFQHVVACLKKYIPNMISDRAWELTNQVHYGGRAIVWVGPQEQAELYLEQLLRAGLTMAQLEPEGS

SEQ ID NO: 8144 - protein, 95 aa, Thermosynechococcus elongatus
ASVVPQEGQHVTRKHYPNYKVIVLNDDFNTFQHVVACLKKYIPNMISDRAWELTNQVHYAGQAIVWVGPQEQAELYHEQLLRAGLTMAPLEPEGS

SEQ ID NO: 8145 - protein, 95 aa, Thermosynechococcus elongatus
ASVVPQEGQHVTRKHYPNYKVIVLNDDFNTFQHVVACLKKYIPNMISDRAWELTNQVHYGGRAIVWVGPQEQAELYHEQLLRAGLTRAPLEPEGS

SEQ ID NO: 8146 - protein, 95 aa, Thermosynechococcus elongatus
ASVVPQEGQHVTRKHYPNYKVIVLNDDFNTFRHVAACLMKYIPNKTSDRAWELTNQVHYEGQAIVWVGPQEQAELYHEQLLRAGLTMAPLEPGGS

SEQ ID NO: 8147 - protein, 95 aa, Thermosynechococcus elongatus
ASVVPQEGQHVTRKHYPNYKVIVLNDDFITFQHVVACLKKYIPNMISDRAWELTNQVHYGGRAIVWVGPQAQAELYHEQLLRAGLTMAPLEPEGS

SEQ ID NO: 8148 - protein, 95 aa, Thermosynechococcus elongatus
ASVVPQEGQHVTRKHYPNYKVLVLNDDFNTFQHVVACLKKDIPNMISDRAWELTNQVHYGGRAIVWVGPQEQAELYHEQLLRAGLTMAPLEPEGS

SEQ ID NO: 8149 - protein, 95 aa, Thermosynechococcus elongatus
ASVVPQEGQHVTRKHYPNYKVLVLNDDFNTFRHVAACLMKYIPNMTSDRAWELTNQVHYEGQAIVWVGPQEQAELYHEQLLRAGLTRAPLEPEGS

SEQ ID NO: 8150 - protein, 95 aa, Thermosynechococcus elongatus
ASVVPQEGQHVTRKHYPNYKVLVLNDDFNTFRHVAACLMKYIPNMTSDRAWVLTNQVHYIGLAIVWVGPQEQAELNHDQLLRAGLTMAPLEPEGS

SEQ ID NO: 8151 - protein, 95 aa, Thermosynechococcus elongatus
ASVVPQEGQHVTRKHYPNSKVIVLNDDFNTFQHVVACLKKYIPNMISDRAWELTNQVHYGGRAIVWVGPQEQAELYHEQLLRAGLTMAPLEPEGS

SEQ ID NO: 8152 - protein, 95 aa, Thermosynechococcus elongatus
ASVVPQEGQHVTRKHYPNYKVIVLNDDFNTFQHVVACLKKYIPNMISDRAWELTNQVHYGGRAIVWVGPQEQAELYHEQLLRAGLTMAPLEPGGS

SEQ ID NO: 8153 - protein, 95 aa, Thermosynechococcus elongatus
ASVVPQEGQHVTRKHYPNYKVIVLNDDFNTFQHVVACLMKYIPNMTSDRAWELTNQVHYKGQAIVWVGPQEQAELNHEQLLRAGLTMAPLEPEGS

SEQ ID NO: 8154 - protein, 95 aa, Thermosynechococcus elongatus
ASVVPQEGQRVTRKHYPNYKVIVLNDDFNTFQHVVACLKKYIPNMISDRAWELTNQVHYGGRAIVWVGPQEQAELYHEQLLRAGLTMAPLEPEGS

SEQ ID NO: 8155 - protein, 95 aa, Thermosynechococcus elongatus
ASVVPQEGPQVTRKHYPNYKVIVLNDDFNTFQHVVACLKKYIPNMISDRAWELTNQVHYGGRAIVWVGPQEQAELYHEQLLRAGLTMAPLVPEGS

SEQ ID NO: 8156 - protein, 95 aa, Thermosynechococcus elongatus
ASVVPQEGRQVTRKHYPNYKVIVLNDDFNTFQHVVACLKKYIPNMISDRAWELTNQVHYGGRAIVWVGPQEQAELYHEQLLRAGLTMAPLEPEGS

SEQ ID NO: 8157 - protein, 59 aa, Thermosynechococcus elongatus
ASVVPQEGRQVTRKHYPNYKVIVLNDDFNTFQHVVACLKKYIPNMISDRAWELTNQVHY

SEQ ID NO: 8158 - protein, 95 aa, Thermosynechococcus elongatus
ASVVPQEGRQVTRKHYPNYKVIVLNDDFNTFQHVVACLKKYIPNMISDRAWELTNQVLYGGRAIVWVGPQEQAELYHEQLLRAGLTMAPLEPEGS

SEQ ID NO: 8159 - protein, 95 aa, Thermosynechococcus elongatus; identical to SEQ ID NO: 225

SEQ ID NO: 8160 - protein, 95 aa, Thermosynechococcus elongatus; identical to SEQ ID NO: 11

SEQ ID NO: 8161 - protein, 95 aa, Thermosynechococcus elongatus; identical to SEQ ID NO: 11

SEQ ID NO: 8162 - protein, 95 aa, Thermosynechococcus elongatus
ASVVPQEVQQVTRKHNPNNKVIVLNDHFNTFQHVVACLMKYIPNKTSDRAWELTNQVIFDGLAIVWVCTQELSELYLDLLLIAGLSMAPLVPEGS

SEQ ID NO: 8163 - protein, 95 aa, Thermosynechococcus elongatus
ASVVPQEVQQVTRKHYPNYKVIVLNDDFNTFQHDVACLKKYIPNMISDRAWELTNQVHYGGRAIVWVGPQEQAELYHEQLLRAGLTMAPLEPEGS

SEQ ID NO: 8164 - protein, 95 aa, Thermosynechococcus elongatus
ASVVPQEVQQVTRKHYPNYKVIVLNDDFNTFQHVVACLKKYIPNMISDRAWELTNQVHYEGQAIVWVGPQEQAELYHEQLLRAGLTMAPLEPEGS

SEQ ID NO: 8165 - protein, 95 aa, Thermosynechococcus elongatus
ASVVPQEVQQVTRKHYPNYKVIVLNDDFNTFQHVVACLKKYIPNMISDRAWELTNQVHYGGRAIVWFGPQEQAELYHEQLLRAGLTMAPLEPEGS

SEQ ID NO: 8166 - protein, 95 aa, Thermosynechococcus elongatus
ASVVPQEVQQVTRKHYPNYKVIVLNDDFNTFQHVVACLKKYIPNMISDRAWELTNQVHYGGRAVVWVGPQEQAELYHEQLLRAGLTMAPLEPEGS

SEQ ID NO: 8167 - protein, 95 aa, Thermosynechococcus elongatus
ASVVPQEVQQVTRKHYPNYKVIVLNDDFNTFQHVVACLKKYIPNMISDRAWELTNQVLYGGRAIVWVGPQELAELYHEQLLRAGLTMANLEPEGS

SEQ ID NO: 8168 - protein, 38 aa, Thermosynechococcus elongatus
ASVVPQEVQQVTRKHYPNYKVIVLNDDFNTFQHVVACL

SEQ ID NO: 8169 - protein, 95 aa, Thermosynechococcus elongatus
ASVVPQEVQQVTRKHYPNYKVIVLNDDFNTFRHVAACLMKYIPNMTSDRAWELTNQVHYKGQAIVWVGPQEQAELNHEQLLRAGLTMAPLEPEGS

SEQ ID NO: 8170 - protein, 7 aa, Thermosynechococcus elongatus
ASVVPQE

SEQ ID NO: 8171 - protein, 7 aa, Thermosynechococcus elongatus
ASVVPQE

SEQ ID NO: 8172 - protein, 7 aa, Thermosynechococcus elongatus
ASVVPQE

SEQ ID NO: 8173 - protein, 7 aa, Thermosynechococcus elongatus
ASVVPQE

SEQ ID NO: 8174 - protein, 7 aa, Thermosynechococcus elongatus
ASVVPQE

SEQ ID NO: 8175 - protein, 7 aa, Thermosynechococcus elongatus
ASVVPQE

SEQ ID NO: 8176 - protein, 7 aa, Thermosynechococcus elongatus
ASVVPQE

SEQ ID NO: 8177 - protein, 7 aa, Thermosynechococcus elongatus
ASVVPQE

SEQ ID NO: 8178 - protein, 95 aa, Thermosynechococcus elongatus
ASVVPQDRQQDTRKHYPNYKVIVLNDDFNTFRHVAACLMKYIPNKTSDRAWELTNQVHYEGQAIVWVGPQEQAELYHEQLLRAGLTMAPLEPEGS

SEQ ID NO: 8179 - protein, 95 aa, Thermosynechococcus elongatus
ASVVPQDRQQDTRKHYPNYKVIVLNDDFNTFRHVAACLMKYIPNMTSDRAWELTNQVHYEGQAIVWVGPQEQAELYHEQLLRAGLTMAPLEPGGS

SEQ ID NO: 8180 - protein, 95 aa, Thermosynechococcus elongatus
ASVVPQDRQQDTRKHYPNYKVIVLNDDFNTFRHVAACLMKYIPNMTSDRAWELTNQVLYEGQAIVWVGPQEQAELYHEQLLRAGLTMAPLEPEGS

SEQ ID NO: 8181 - protein, 95 aa, Thermosynechococcus elongatus
ASVVPQDRQQDTRKHYPNYTVIVLNDDFNTFRHVAACLMKYIPNKTSDRAWELTNQVHYEGQAIVWVGPQEQAELYHEQLLRAGLTMAPLEPEGS

SEQ ID NO: 8182 - protein, 95 aa, Thermosynechococcus elongatus
ASVVPQDRQQDTRKHYPNSTGRVLNDDFNTFQHVVACLKKYIPTKTSDRAWELTNQVHYAGQAIVWVGPQAQAEVYHEHLLRAGLTMAPLEPEGS

SEQ ID NO: 8183 - protein, 95 aa, Thermosynechococcus elongatus
ASVVPQDRQQVTRKHYPNYKVIVLNDDFNTFRHVAACLMKYIPNMTSDRAWELTNHVHYKGQAIVWVGPQEQAELNHEQLLRAGLTMAPLEPEGS

SEQ ID NO: 8184 - protein, 95 aa, Thermosynechococcus elongatus
ASVVPQDRQHDSRKHYPNSKVLVLNDDFNTFRHVAACLMKYIPNKTSDRAWELTNHFHYEGQAIVWVGPQEPAELYHEQLLRAGLTTAPLEPEGS

SEQ ID NO: 8185 - protein, 95 aa, Thermosynechococcus elongatus
ASVVPQDGTQVTRKHYTNNMFIDLNDDLNTFQHVVACLKKYIPNMISDRAWELTNQVHYGGRAIVWDGPQEQAELNHEQLLRAGLTMAPLEPEGS

SEQ ID NO: 8186 - protein, 95 aa, Thermosynechococcus elongatus
ASVVPQDGQQVTRKHYPNYKVIVLNDDFNTFQHVVAGLKKYIPNMISDRAWELTNQVHYGGRAIVWVGPQEQAELYHEQLLRAGLTMAPLEPEGS

SEQ ID NO: 8187 - protein, 95 aa, Thermosynechococcus elongatus
ASVVPQDGQQVTRKHYPNYKVIVLNDDFNTFQHVVACLKKYIPNMISDRAWELTNQVHYEGQAIVWVGPQEQAELYHEQLLRAGLTMAPLEPEGS

SEQ ID NO: 8188 - protein, 95 aa, Thermosynechococcus elongatus
ASVVPQDGQQVTRKHYPNSKGIVLNDDFNTFQHVVACLKKYIPNMISDRAWELTNQVHYGGRAIVWVGPQEQAELYHEQLLRAGLTMAPLEPEGS

SEQ ID NO: 8189 - protein, 95 aa, Thermosynechococcus elongatus
ASVVPQDGQHVTRKHYPNYQGIGLNDDFNTFQHVVACLKTYLPYKISDRAGDLTTLGHYGGRAIVWVGPHEQADLDHHQVLRAGWTLAPLEPEGS

SEQ ID NO: 8190 - protein, 95 aa, Thermosynechococcus elongatus; identical to SEQ ID NO: 1194

SEQ ID NO: 8191 - protein, 95 aa, Thermosynechococcus elongatus
ASVVPQEKQQVSRKHYPNYKVIVLNDDFNTFQHVAACLMKYIPNMTSDRAWELTNQVHYKVQAIVWVGPQEQAELYHGQLLRAGLTMAPLEPEGS

SEQ ID NO: 8192 - protein, 95 aa, Thermosynechococcus elongatus
ASVVPQEKQQVSRKHYPNYKVIVLNDDFNTFQHVAACLMKYIPNMTSDRAWELTNQVHYEGQAIVWVGPQEQAELYHEQLLRTGLTMAPLEPEGS

SEQ ID NO: 8193 - protein, 95 aa, Thermosynechococcus elongatus; identical to SEQ ID NO: 3

SEQ ID NO: 8194 - protein, 95 aa, Thermosynechococcus elongatus
ASVVPQERQQDTRKHYPNYKVIVLNDDFNTFRHVAACLMKYIPNMTSDRAWELTNQVHYEGQAIVWVGPQEQAELYHEQLLRAGLTMAPVEPEGS

SEQ ID NO: 8195 - protein, 95 aa, Thermosynechococcus elongatus
ASVVPQERQQDTRMHYPSYKVIVLNDDFNTFRHVAACLMKYIPIMTSDRAWELTNQVHYEGQAIVWVGPQEQAELYHEQLLRAGLTMAPLEPEGS

SEQ ID NO: 8196 - protein, 95 aa, Thermosynechococcus elongatus; identical to SEQ ID NO: 4298

SEQ ID NO: 8197 - protein, 95 aa, Thermosynechococcus elongatus; identical to SEQ ID NO: 2

SEQ ID NO: 8198 - protein, 95 aa, Thermosynechococcus elongatus; identical to SEQ ID NO: 7

SEQ ID NO: 8199 - protein, 95 aa, Thermosynechococcus elongatus; identical to SEQ ID NO: 34

SEQ ID NO: 8200 - protein, 95 aa, Thermosynechococcus elongatus; identical to SEQ ID NO: 15

SEQ ID NO: 8201 - protein, 95 aa, Thermosynechococcus elongatus; identical to SEQ ID NO: 29

SEQ ID NO: 8202 - protein, 95 aa, Thermosynechococcus elongatus
ASVVPQERQQVTRNHYPNYKVIVLNDDFNTFQHVVACLKKYIPNMTSDRAWELTNPVHYKGQAIVWVGPQEQAELNHEQLLRAGLTMAPLEPEGS

SEQ ID NO: 8203 - protein, 95 aa, Thermosynechococcus elongatus; identical to SEQ ID NO: 325

SEQ ID NO: 8204 - protein, 95 aa, Thermosynechococcus elongatus; identical to SEQ ID NO: 1

SEQ ID NO: 8205 - protein, 95 aa, Thermosynechococcus elongatus; identical to SEQ ID NO: 151

SEQ ID NO: 8206 - protein, 95 aa, Thermosynechococcus elongatus; identical to SEQ ID NO: 17

SEQ ID NO: 8207 - protein, 95 aa, Thermosynechococcus elongatus
ASVVPQEGQQVTRKHYPNYKVIVLNDDFDTFRHVAACLMKYIPNKTSDRAWELTNQVHYEGQAIVWVGPQEQAELYHEQLLRAGLTMAPLEPEGS

SEQ ID NO: 8208 - protein, 95 aa, Thermosynechococcus elongatus; identical to SEQ ID NO: 8178

SEQ ID NO: 8209 - protein, 95 aa, Thermosynechococcus elongatus; identical to SEQ ID NO: 2027

SEQ ID NO: 8210 - protein, 95 aa, Thermosynechococcus elongatus
ASVVPQARQQVARKHYPNSKVIVLNDDFNTFQHVVACLKKYIPNMISDRAWELTNQVHYGGRAIVWVGPQEQAELYHEQLLRAGLTMAPLEPEGS

SEQ ID NO: 8211 - protein, 77 aa, Thermosynechococcus elongatus
ASVVPQARQQDTRKHYPNYKVIDLNDDFNTFRHVAACLMKYIPNMTSDRAWELTNQVHYEGQAIVWVGPQEQAELFH

SEQ ID NO: 8212 - protein, 95 aa, Thermosynechococcus elongatus
ASVVPQGRQQVARKHYPNYKVIVLNDDFNTFRHVAACLMKYIPNMTSDRAWELTNQVHYEGQAIVWVGPQVQAELYHEQLLRAGLTMAPLEPEGS

SEQ ID NO: 8213 - protein, 95 aa, Thermosynechococcus elongatus
ASVVPQGRQQDTRKHYPNYKVIVLNDDFNTFRHVAACLMKYIPNKTSDRAWELTNQVHYEGQAIVWVGPQEQAELYHEQLLRAGLTMAPLEPEGS

SEQ ID NO: 8214 - protein, 95 aa, Thermosynechococcus elongatus
ASVVPQGRQQDTRKHYPNYKVIVLNDDFNTFRHVAACLMKYIPNMTSDRAWELTNQVHYEGQAIVWVGPQEQAELYHEQLLRAGLTMAPLEPEGS

SEQ ID NO: 8215 - protein, 23 aa, Thermosynechococcus elongatus
ASVVPQGRQQVTRKHNPNYKVIV

SEQ ID NO: 8216 - protein, 23 aa, Thermosynechococcus elongatus
ASVVPQGRQQVTRKHNPNYKVIV

SEQ ID NO: 8217 - protein, 23 aa, Thermosynechococcus elongatus
ASVVPQGRQQVTRKHNPNYKVIV

SEQ ID NO: 8218 - protein, 23 aa, Thermosynechococcus elongatus
ASVVPQGRQQVTRKHNPNYKVIV

SEQ ID NO: 8219 - protein, 95 aa, Thermosynechococcus elongatus
ASVVPQGRQQVTRKHYPNYKVIVLNDDFNTFQHVAACLMKYIPNMTSDRAWELTNQVHYEGQAIVWVGPQEQAELYHEQLLRAGLTMAPLEPEGS

SEQ ID NO: 8220 - protein, 95 aa, Thermosynechococcus elongatus
ASVVPQGGQQVTRKHYPNYKVIVLNDDFNTFQHVVACLKKYIPIMISDRAWELTNQGHYGGRAIVWVGPQEQAELYHEQLLRAGLTMAPLEPEGS

SEQ ID NO: 8221 - protein, 95 aa, Thermosynechococcus elongatus
ASVVPQGGQQVTRKHYPNYKVIVLNDDFNTFQHVVACLKKYIPNMISDRAWELTNQVHYGGRAIVWVGPQEQAELYHEQLLRAGLTMAPLEPEGS

SEQ ID NO: 8222 - protein, 95 aa, Thermosynechococcus elongatus
ASVVPQGKQQVSRKHYPNYKVIVLNDDFNTFQHVAACLMKYIPNMTSDRAWELTNQVHYKGQAIVWVGPQEQAELYHGQLLRAGLTMAPLEPEGS

SEQ ID NO: 8223 - protein, 95 aa, Thermosynechococcus elongatus; identical to SEQ ID NO: 1196

SEQ ID NO: 8224 - protein, 95 aa, Thermosynechococcus elongatus
ASVVPQVRQQVTRKHYPNYKVIVLNDDFNTFRHVAACLMKYIPNKTSDRAWELTNQVHYVGQAIVCVGPQERAELYHEQLLRAGLTMAPLEPEGS

SEQ ID NO: 8225 - protein, 95 aa, Thermosynechococcus elongatus
ASVVPQVRQQVARKHHPNYKVIVLNDDFNTFRHVAACFMKYIPNMNSDRALELTNQVHYEGQAIVCVGPQEQAELYHEQLLRAGLTMAPLEPEGS

SEQ ID NO: 8226 - protein, 95 aa, Thermosynechococcus elongatus
ASVVPQVRQQVARKHYQNYKVIVLNDDFNTFRHVAACLMKYIPNMTSDRAWELTNQVHYEGQAIVWVGPQVQAELYHEQLLRAGLTMAPLEPGGS

SEQ ID NO: 8227 - protein, 95 aa, Thermosynechococcus elongatus
ASVVPQVRQQVARKHYPNYKVIVLNDDFNTFRHVAACLMKYIPNKTSDRAWELTNQVHYEGQAIVWVGPQEQAELYHEQLLRAGLTMAPLEPEGS

SEQ ID NO: 8228 - protein, 95 aa, Thermosynechococcus elongatus
ASVVPQVRQQVARKHYPNYKVIVLNDDFNTFRHVAACLMKYIPNMTSDRAWELTNQVHYEGQAIVWVGPQEQAELYHEQLLRAGLTIAPLEPEGS

SEQ ID NO: 8229 - protein, 95 aa, Thermosynechococcus elongatus
ASVVPQVRQQVARKHYPNYKVIVLNDDFNTFRHVAACLMKYIPNMTSDRAWELTNQVHYEGQAIVWVGPPVQAELYPEQLLRAGLTMAPLEPGGS

SEQ ID NO: 8230 - protein, 95 aa, Thermosynechococcus elongatus; identical to SEQ ID NO: 643

SEQ ID NO: 8231 - protein, 95 aa, Thermosynechococcus elongatus
ASVVPQVRQQVARKHYPNYKVIVLNDDFNTFRHVAACLMKYIPNMTSDRAWELTNQVHYEGQAIVCVGPQEQAELYHEQLLRAGLTMAPLEPEGS

SEQ ID NO: 8232 - protein, 95 aa, Thermosynechococcus elongatus
ASVVPQVRQQVARNHYPNYKVIVLNDDFNTFRHVAACLMKYIPNMTSDRAWELTNQVHYEGQAIVWVGPQVQAELYHEQLLRAGLTMAPLEPGGS

SEQ ID NO: 8233 - protein, 95 aa, Thermosynechococcus elongatus
ASVVPQVRQQVASKHYPNYKVIVLNDDFNTFRHVAACLMKYIPNMTSDRAWELTNQVHYEGQAIVWVGPQVQAELYHEQLLRAGLTMAPLEPEGS

SEQ ID NO: 8234 - protein, 95 aa, Thermosynechococcus elongatus
ASVVPQVRQQVASKHYPNYKVIVLNDDFNTFRHVAACLMKYIPNMTSDRAWELTNQVHYEGQAIVWVGPQVQAELYHEQLLRAGLTMAPLEPGGS

SEQ ID NO: 8235 - protein, 95 aa, Thermosynechococcus elongatus
ASVVPQVRQQVASMHYPNYKVIVLNDDFNTFRHVAACLMKYIPNKTSDRAWELTNQVHYEGQAIDCVGPQEQAELYHEQLLRAGLTMAPLEPEGS

SEQ ID NO: 8236 - protein, 95 aa, Thermosynechococcus elongatus
ASVVPQVRQQDTRKHYPNYKVIVLNDEFNTFRHGAACLMKYIPNKTSDRAWELTNQVHYEGQAIVWVGPQEQAELYHEQLLRAGLTMAPLEPEGS

SEQ ID NO: 8237 - protein, 40 aa, Thermosynechococcus elongatus
ASVVPQVRQQDTRKHYPNYKVIVLNDDFNTFRHVAACLMK

SEQ ID NO: 8238 - protein, 95 aa, Thermosynechococcus elongatus
ASVVPQVRQQDTRKHYPNYKVIVLNDDFNTFRHVAACLMKYIPNKTSDRAWELTNQVHYEGQAIVCVGPQEQAELYHEQLLRAGLTMAPLEPEGS

SEQ ID NO: 8239 - protein, 95 aa, Thermosynechococcus elongatus
ASVVPQVRQQDTRKHYPNYKVIVLNDDFNTFRHVAACLMKYIPNKTSDRAWELTNQVHYEGQSIVWVGPQEQAELYHEQLLRAGLTMAPLEPEGS

SEQ ID NO: 8240 - protein, 95 aa, Thermosynechococcus elongatus
ASVVPQVRQQDTRKHYPNYKVIVLNDDFNTFRHVAACLMKYIPNMTSDRAWELTNQVHYEGQAIVWVGPQEQAELYHEQLLRTGLTMAPLEPEGS

SEQ ID NO: 8241 - protein, 95 aa, Thermosynechococcus elongatus
ASVVPQVRQQDTRKHYPNYKVIVLNDDFNTFRHVAACLMKYIPNMTSDRAWELTNQVHYEGQAIVWVGPQEQAELYHEQLLRAGLTIAPLEPEGS

SEQ ID NO: 8242 - protein, 95 aa, Thermosynechococcus elongatus
ASVVPQVRQQDTRKHYPNYKVIVLNDDFNTFRHVSACLMKYIPNKTSDRAWELTNQVHYEGQAIVWVGPQEQAELYHEQWLRAGLTMAPLEPEGS

SEQ ID NO: 8243 - protein, 95 aa, Thermosynechococcus elongatus
ASVVPQVRQQDTRKLYPNYKVIVLNDDFNTFRHVAACLMKYIPNKTSDRAWELTNQVHYEGQAIVWVGPQEQAELYHEQLLRAGLTMAPLEPEGS

SEQ ID NO: 8244 - protein, 95 aa, Thermosynechococcus elongatus
ASVVPQVRQQDTSKHYPNYKVIVLNDDFNTFRHVAACLMKYIPNKTSDRAWELTNQVHYEGQAIVWVGPQEQAELYHEQLLRAGLTMAPLEPGGS

SEQ ID NO: 8245 - protein, 95 aa, Thermosynechococcus elongatus
ASVVPQVRQQDTSKHYPNYKVIVLNDDFNTFRHVAACLMKYIPNMTSDRAWELTNQVHYKGQAIVWVGPQEQAELNHEQLLRAGLTMAPLEPEGS

SEQ ID NO: 8246 - protein, 95 aa, Thermosynechococcus elongatus
ASVVPQVRQQVTRKHYPNYKVIVLNDDFNTFRHVAACLMKYIPNKTSDRAWELTNQVHYGGRAIVWVGPQEQAELYHEQLLRAGLTMAPLEPEGS

SEQ ID NO: 8247 - protein, 51 aa, Thermosynechococcus elongatus
ASVVPQVRQQVTRKHHPNYKVIVLNDDFNTFRHVDACLMKYIPNMTSDRAW

SEQ ID NO: 8248 - protein, 95 aa, Thermosynechococcus elongatus
ASVVPQVRQQVTRKHHPNYKVIVLNDDFNTFRHVAACLMKYIPNMTSDRAWELTNQVHYEGQAIVWVGPQEQAELYHEQLLRAGLTMAPLEPEGS

SEQ ID NO: 8249 - protein, 36 aa, Thermosynechococcus elongatus
ASVVPQVRQQVTRKHYTNYKVIVLNDDFITFRHVAA

SEQ ID NO: 8250 - protein, 95 aa, Thermosynechococcus elongatus
ASVVPQVRQQVTRKHYPNYKVIVLNEDFNTFRHVAACLMKYIPNMTSDRAWELTNQVHYEGQAIVWVGPQEQAELYHEQLLRAGLTMAPLEPEGS

SEQ ID NO: 8251 - protein, 37 aa, Thermosynechococcus elongatus
ASVVPQVRQQVTRKHYPNYKVIVLNDDFNTFRHVAAC

SEQ ID NO: 8252 - protein, 58 aa, Thermosynechococcus elongatus
ASVVPQVRQQVTRKHYPNYKVIVLNDDFNTFRHVAACLMKYIPNMTSDRAWELTNQVH

SEQ ID NO: 8253 - protein, 95 aa, Thermosynechococcus elongatus; identical to SEQ ID NO: 2037

SEQ ID NO: 8254 - protein, 95 aa, Thermosynechococcus elongatus
ASVVPQVRQQVTRKHYPNYKVIVLNVDFNTFRHVAACLMKYIPNMTSDRAWELTNQVHYEGQAIVWVGPQVQAELYHEQLLRAGLTMAPLEPGGS

SEQ ID NO: 8255 - protein, 95 aa, Thermosynechococcus elongatus
ASVVPQVRQQVTRKLHPNYKVIVLNDDFNTFRHVAACLMKYIPNMTSDRAWELTNQVHYEGQAIVWVGPQEQAELYHEQLLRAGLTIAPLEPEGS

SEQ ID NO: 8256 - protein, 95 aa, Thermosynechococcus elongatus
ASVVPQVGQQDTRKHYPNYKVIVLNDDFNTFRHVAACLMKYIPNMTSDRAWELTNQVHYEGQAIVWVGPQVQAELYHEQLLRAGLTMAPLEPGGS

SEQ ID NO: 8257 - protein, 38 aa, Thermosynechococcus elongatus
ASVVPQVGQQVTRKHYTNYKVIVLNDDFNTFQHVVACL

SEQ ID NO: 8258 - protein, 95 aa, Thermosynechococcus elongatus
ASVVPQVGQQVTRKHYQNYKVIVLNDDFNTFKHVVACLKKYIPNMISDRAWELTNQVHYGGRAIVCVGPQEQAELYHEQLLRAGLTMATLEPEGS

SEQ ID NO: 8259 - protein, 36 aa, Thermosynechococcus elongatus
ASVVPQVGQQVTRKHYPNYKVIVLNDDFNTFQHVVA

SEQ ID NO: 8260 - protein, 95 aa, Thermosynechococcus elongatus
ASVVPQVGQQVTRKHYPNYKVIVLNDDFNTFQHVVACLKKYIPNMTSDRAWELTNQVHYEGQAIVWVGPQEQAELYHEQLLRAGLTMAPLEPEGS

SEQ ID NO: 8261 - protein, 95 aa, Thermosynechococcus elongatus
ASVVPQVGQQVTRKHYPNYKVIVLNDDFNTFQHVVACLKKYIPNMISDRAWELTNQVHYKGQAIVWVGPQEQAELYHEQLLRAGLTMAPLEPEGS

SEQ ID NO: 8262 - protein, 95 aa, Thermosynechococcus elongatus
ASVVPQVGQQVTRKHYPNYKVIVLNDDFNTFQHVVACLKKYIPNMISDRAWELTNQVHYEGQAIVWVGPQEQAELYHEQLLRAGLTMAPLEPEGS

SEQ ID NO: 8263 - protein, 95 aa, Thermosynechococcus elongatus
ASVVPQVGQQVTRKHYPNYKVIVLNDDFNTFQHVVACLKKYIPNMISDRAWELTNQVHYEGQAIVWVGPQVQAELYHEQLLRAGLTMAPLEPGGS

SEQ ID NO: 8264 - protein, 90 aa, Thermosynechococcus elongatus
ASVVPQVGQQVTRKHYPNYKVIVLNDDFNTFQHVVACLKKYIPNMISDRAWELTNQVHYEGQAIVWVGPREQAELYHEQLLRVGLTMAPL

SEQ ID NO: 8265 - protein, 95 aa, Thermosynechococcus elongatus; identical to SEQ ID NO: 440

SEQ ID NO: 8266 - protein, 95 aa, Thermosynechococcus elongatus
ASVVPQVGQQVTRKHYPNYKVIVLNDDFNTFQHVVACLKKYIPNMISDRAWELTNQVHYGGRAIVWVGQQEQAELYHEQLLRAGLTMAPLEPEGS

SEQ ID NO: 8267 - protein, 95 aa, Thermosynechococcus elongatus
ASVVPQVGQQVTRKHYPNYKVIVLNDDFNTFQHVVACLKKYIPNMISDRAWELTNQVHYGGRAIVWVGPQEQAELDHEQLLRAGLTMAPLEPEGS

SEQ ID NO: 8268 - protein, 95 aa, Thermosynechococcus elongatus
ASVVPQVGQQVTRKHYPNYKVIVLNDDFNTFQHVVACLKKYIPNMISDRSWELTNQVHYGGRSIVWVGPQEQAELYHEQLLRAGLTMAPLEPEGS

SEQ ID NO: 8269 - protein, 95 aa, Thermosynechococcus elongatus
ASVVPQVGQQVTRKHYPNYKVIVLNDDFNTFRHVAACLMKYITNKTSDRAWELTNQVHYGGRAIDWVGPQEQAELYHEQLLRAGLTIAPLEPEGS

SEQ ID NO: 8270 - protein, 95 aa, Thermosynechococcus elongatus
ASVVPQVGQQVTRKHYPNYKVIVLNDDFNTFRHVAACLMKYIPNKTSDRAWELTNQVHYEGQAIVWVGPQEQAELYHEQLLRAGLTMAPLEPEGS

SEQ ID NO: 8271 - protein, 95 aa, Thermosynechococcus elongatus
ASVVPQVGQQVTRKHYPNYKVIVLNDDFNTFRHVAACLMKYIPNMTSDRAWELTNQVHYEGQAIVWVGPQEQAELNHEQLLRAGLTMAPLEPEGS

SEQ ID NO: 8272 - protein, 95 aa, Thermosynechococcus elongatus
ASVVPQVGQQVTRKHYPNYKVIVLNDDFNTFRHVAACLMKYIPNMTSDRAWELTNQVHYEGQAIVWVGPQEQAELYHEQLLRAGLTMAPLEPEGS

SEQ ID NO: 8273 - protein, 95 aa, Thermosynechococcus elongatus
ASVVPQVGQQVTRKHYPNYKVIVLNDDFNTFRHVAACLMKYIPNMTSDRAWELTNQVHYEGRAIVWVGPQEQAELYHEQLLRAGLTMAPLEPEGS

SEQ ID NO: 8274 - protein, 95 aa, Thermosynechococcus elongatus
ASVVPQVGQQVTRKHYPNYKVIVLNDDFNTFRHVAACLMKYIPNMTSDRAWELTNQVHYKGQAIVWVGPQEQAELNHEQLLRAGLTMAPLEPEGS

SEQ ID NO: 8275 - protein, 95 aa, Thermosynechococcus elongatus
ASVVPQVGQQVTRKHYPNYKVIVLNDDFYTFQHVVACLKKYIPNMISDRAWELTNQVHYGGRAIVCVGPQEQAELYHEQLLRAGLTMAPLEPEGS

SEQ ID NO: 8276 - protein, 95 aa, Thermosynechococcus elongatus
ASVVPQVGQQVTRKHYPNYKVIVLYDDFNTFQHVVACLKKYIPNMISDRAWELTNQVHYGGRAIVWVGPQEQAELYHEQLLRAGLTMAPLEPEGS

SEQ ID NO: 8277 - protein, 95 aa, Thermosynechococcus elongatus
ASVVPQVGQQVTRKHYPNYKVIVLYDDFNTFQHVVACLKKYIPNMISDRAWELTNQVHYGGRAIVWVGPQEQAELYHEQLLRAGLTMAPLEPGGS

SEQ ID NO: 8278 - protein, 95 aa, Thermosynechococcus elongatus
ASVVPQVGQQVTRKLYQNYKVIVLNDDFNTFQHVVACLKKYIPNMISDRAWELTNQVHYGGRAIVWVGPQEQAELYHEQLLRAGLTMAPLEPEGS

SEQ ID NO: 8279 - protein, 95 aa, Thermosynechococcus elongatus
ASVVPQVGQQVTRKLYPNYKVIILNDDFNTFQHVAACLMKYIPNMTSDRAWELTNQVHYEGQAIVRVGPQEQAELYHKQLLRAGLTMAPLEPEGS

SEQ ID NO: 8280 - protein, 95 aa, Thermosynechococcus elongatus
ASVVPQVGQQVTSKHYTNYKVIVLNDDFNTFQHVVACLKKYIPNMISDRAWELTNQVHYGGRAIVWVGPQEQAELYHEQLLRAGLTMAPLEPEGS

SEQ ID NO: 8281 - protein, 95 aa, Thermosynechococcus elongatus
ASVVPQVGQQVTSKHYPNYKVIVLNDDFNTFRHVAACLMKYIPNMTSDRAWELTNQVHYEGQAIVWVGPQVQAELYHEQLLRAGLTMAPLEPGGS

SEQ ID NO: 8282 - protein, 95 aa, Thermosynechococcus elongatus
ASVVPQVGQQVTSKHYPNYKVIVLNDDFNTFLDVVACLKKYIPNMISDRAWELTNQVHYGGRAIVWVGPQEQAELYHEQLLRAGLTMAPLEPEGS

SEQ ID NO: 8283 - protein, 6 aa, Thermosynechococcus elongatus
ASVVPQ

SEQ ID NO: 8284 - protein, 6 aa, Thermosynechococcus elongatus
ASVVPQ

SEQ ID NO: 8285 - protein, 6 aa, Thermosynechococcus elongatus
ASVVPQ

SEQ ID NO: 8286 - protein, 6 aa, Thermosynechococcus elongatus
ASVVPQ

SEQ ID NO: 8287 - protein, 6 aa, Thermosynechococcus elongatus
ASVVPQ

SEQ ID NO: 8288 - protein, 6 aa, Thermosynechococcus elongatus
ASVVPQ

SEQ ID NO: 8289 - protein, 6 aa, Thermosynechococcus elongatus
ASVVPQ

SEQ ID NO: 8290 - protein, 6 aa, Thermosynechococcus elongatus
ASVVPQ

SEQ ID NO: 8291 - protein, 6 aa, Thermosynechococcus elongatus
ASVVPQ

SEQ ID NO: 8292 - protein, 6 aa, Thermosynechococcus elongatus
ASVVPQ

SEQ ID NO: 8293 - protein, 6 aa, Thermosynechococcus elongatus
ASVVPQ

SEQ ID NO: 8294 - protein, 6 aa, Thermosynechococcus elongatus
ASVVPQ

SEQ ID NO: 8295 - protein, 6 aa, Thermosynechococcus elongatus
ASVVPQ

SEQ ID NO: 8296 - protein, 6 aa, Thermosynechococcus elongatus
ASVVPQ

SEQ ID NO: 8297 - protein, 6 aa, Thermosynechococcus elongatus
ASVVPQ

SEQ ID NO: 8298 - protein, 6 aa, Thermosynechococcus elongatus
ASVVPQ

SEQ ID NO: 8299 - protein, 6 aa, Thermosynechococcus elongatus
ASVVPQ

SEQ ID NO: 8300 - protein, 6 aa, Thermosynechococcus elongatus
ASVVPQ

SEQ ID NO: 8301 - protein, 6 aa, Thermosynechococcus elongatus
ASVVPQ

SEQ ID NO: 8302 - protein, 6 aa, Thermosynechococcus elongatus
ASVVPQ

SEQ ID NO: 8303 - protein, 6 aa, Thermosynechococcus elongatus
ASVVPQ

SEQ ID NO: 8304 - protein, 77 aa, Thermosynechococcus elongatus
ASVVPQLRQQVARKHYTNYKVIVLNYDFNTFRHVAACLMKYIPNMTSDRAWELTNQVHYGGRAIVWVGPQEQAELYH

SEQ ID NO: 8305 - protein, 95 aa, Thermosynechococcus elongatus
ASVVPQLGQQVTRKHYPNYKVIVLNDDFNTFRHVAACLMKYIPNKTSDRAWELTNQVHYEGQAIVWVGPQEQAELYHEQLLRAGLTMAPLEPEGS

SEQ ID NO: 8306 - protein, 19 aa, Thermosynechococcus elongatus
ASVVPHERQQVARKHDPNY

SEQ ID NO: 8307 - protein, 95 aa, Thermosynechococcus elongatus
ASVVPHERQQVARKHYPNYKVIVLNDDFNTFRHVAACLMKYIPNMTSDRAWELTNQVHYEGQAIVWVGPQVQAELHHEQLLRAGLTMAPLEPGGS

SEQ ID NO: 8308 - protein, 95 aa, Thermosynechococcus elongatus
ASVVPHERQQVARKHYPNYKVIVLNDDFNTFRHVAACLMKYIPNMTSDRAWELTNQVHYGGRAIVWVGPQEQAELYHEQLLRAGLTMAPLEPEGS

SEQ ID NO: 8309 - protein, 95 aa, Thermosynechococcus elongatus
ASVVPHERQQVASKHYPTYKVIVLNDDFNTFRHVAACLMKYIPNMTSDRAWELTNHVHYEAQAIVWVGPQVQAELYHEHLLSAGLTIAPLEPGGS

SEQ ID NO: 8310 - protein, 95 aa, Thermosynechococcus elongatus
ASVVPHERQQDTRKHYPNYKVIVLNDDFNTFRHDAACLMKCIPNKTSDRAWELTNQVHYEGQAIVWVGPQEQAELYHEQLLRAGLTLAPLVPEGS

SEQ ID NO: 8311 - protein, 95 aa, Thermosynechococcus elongatus
ASVVPHERQQDTRKHYPNYKVIVLNDDFNTFRHVAACLMKYIPNKTSDRAWELTNQVHYEGQAIVWVGPQEQAELYHEQLLRAGLTMAPLEPEGS

SEQ ID NO: 8312 - protein, 95 aa, Thermosynechococcus elongatus; identical to SEQ ID NO: 2043

SEQ ID NO: 8313 - protein, 95 aa, Thermosynechococcus elongatus
ASVVPHERQQVTRKHHPNYKVIVLNDDFNTFRHVAACLMKYIPNMTSDRAWELTNQVHYEGQAIVWVGPQVQAELYHEQLLRAGLTMAPLEPGGS

SEQ ID NO: 8314 - protein, 95 aa, Thermosynechococcus elongatus
ASVVPHERQQVTRKHYPNYKVIVLNDDFNTFQHVVACLKKYIPNMISDRAWELTNQVHYEGQAIVWVGPQEQAELYHEQLLRAGLTMAPLEPEGS

SEQ ID NO: 8315 - protein, 95 aa, Thermosynechococcus elongatus
ASVVPHERQQVTRKHYPNYKVIVLNDDFNTFRHVAACLMKYIPNKTSDRAWELTNQVHYEGQAIVWVGPQEQAELYHEQLLRAGLTMGPLEPEGS

SEQ ID NO: 8316 - protein, 95 aa, Thermosynechococcus elongatus
ASVVPHERQQVTRKHYPNYKVIVLNDDFNTFRHVAACLMKYIPNMTSDRAWELTNQGHYEGQAIVWVGPRAQAEFYHEQLLSVGLTMAPLEPEGS

SEQ ID NO: 8317 - protein, 95 aa, Thermosynechococcus elongatus
ASVVPHEGQQDTRKHYPNYKVIVLNDDFNTFRHVAACLMKYIPNMTSDRAWELTNQVHYEGQAIVWVGPQEQAELYHEQLLRAGLTMAPLEPEGS

SEQ ID NO: 8318 - protein, 95 aa, Thermosynechococcus elongatus
ASVVPHEGQQVTRKHYPNYKVIVLNDDFNTFQHVVACLKKYIPNMISDRAWELTNQVHYGGRAIVWVGPQEQAELYHEQLLRAGLTMAPLEPEGS

SEQ ID NO: 8319 - protein, 95 aa, Thermosynechococcus elongatus
ASVVPHEGQQVTRKHYPNYKVIVLNDDFNTFQHVVACLKKYIPNMISDRAWELTNHVHYGGRAIVWVGPHEQAELYPEQLLRAGLTMAPLEPEGS

SEQ ID NO: 8320 - protein, 95 aa, Thermosynechococcus elongatus; identical to SEQ ID NO: 3

SEQ ID NO: 8321 - protein, 95 aa, Thermosynechococcus elongatus; identical to SEQ ID NO: 9

SEQ ID NO: 8322 - protein, 95 aa, Thermosynechococcus elongatus; identical to SEQ ID NO: 12

SEQ ID NO: 8323 - protein, 95 aa, Thermosynechococcus elongatus; identical to SEQ ID NO: 4930

SEQ ID NO: 8324 - protein, 95 aa, Thermosynechococcus elongatus
ASVVPQERQQDTRKHYPNYTVIVLNDDFNTFQHVAACLMKYIPNMTSDRAWELTNQVHDVGQAIVWVGPQEQAELYHEPLMRAGLTMAPFEPKGS

SEQ ID NO: 8325 - protein, 95 aa, Thermosynechococcus elongatus; identical to SEQ ID NO: 91

SEQ ID NO: 8326 - protein, 95 aa, Thermosynechococcus elongatus; identical to SEQ ID NO: 22

SEQ ID NO: 8327 - protein, 95 aa, Thermosynechococcus elongatus; identical to SEQ ID NO: 17

SEQ ID NO: 8328 - protein, 95 aa, Thermosynechococcus elongatus
ASVVPHVGQQVTRKHYPNYKVIVLNDDFNTFQHVVACLKKYIPNMISDRAWELTNQVHYGGRAIVWVGPQEQAELYHEQLLRAGLTMAPLEPEGS

SEQ ID NO: 8329 - protein, 95 aa, Thermosynechococcus elongatus
ASVVPPERQQVARKHYPNYKVIVLNDDFNTFRHVAACLMKYIPHMTSDRAWELTNQVHYEGQAIVWVGPQVQAELYHEQLLRAGLTMAPLEPEGS

SEQ ID NO: 8330 - protein, 95 aa, Thermosynechococcus elongatus
ASVVPPERQQVARKHYPNYKVIVLNDDFNTFRHVAACLMKYIPNKTSDRAWELTNQVHYEGQAIVWVGPQEQAELYHEQLLRAGLTMAPLEPEGS

SEQ ID NO: 8331 - protein, 95 aa, Thermosynechococcus elongatus
ASVVPPERQQVARKHYPNYKVIVLNDDFNTFRHVAACLMKYIPNMTSDRAWELTNQVHYEGQAIVWVGPQVQAELYHEQLLRAGLTMAPLEPGGS

SEQ ID NO: 8332 - protein, 95 aa, Thermosynechococcus elongatus
ASVVPPERQQDTRKHYPNYKVIVMNDDFNTFRHVAACLMKYIPNMTSDRAWELTNQVNYEGQAIVWVGPQVQAELYHEQLLRAGLTMAPLEPGGS

SEQ ID NO: 8333 - protein, 95 aa, Thermosynechococcus elongatus
ASVVPPERQQDTRKHYPNYKVIVLNDDFNTFQHVVACLKKYIPNMTSDRAWELTNQVHYEGQAIVWVGPQEQAELYHEQLLRAGLTMAPLEPEGS

SEQ ID NO: 8334 - protein, 95 aa, Thermosynechococcus elongatus
ASVVPPERQQDTRKHYPNYKVIVLNDDFNTFRHVAACLMKYIPNKTSDRAWELTNQVHYEGQAIVWVGPQEQAELYHEQLLRAGLTMAPLEPEGS

SEQ ID NO: 8335 - protein, 95 aa, Thermosynechococcus elongatus
ASVVPPERQQDTRKHYPNYKVIVLNDDFNTFRHVAACLMKYIPNMTSDRAWELTNQVHYEGQAIVWVGPQVQAELYHEQLLRAGLTMAPLEPGGS

SEQ ID NO: 8336 - protein, 95 aa, Thermosynechococcus elongatus
ASVVPPERQQDTRKPYPNYKVIVLNDDFNTFRHVAACLMKYIPNKTSDRAWELTNQVHYEGQAIVWVGPQEQAELYHEQLLRAGLTMAPLEPEGS

SEQ ID NO: 8337 - protein, 95 aa, Thermosynechococcus elongatus
ASVVPPERQQVTRKHYPNYKVIVLNDDFNTYRHVAACLMKYIPNMTSDRAWELTNQVHYKGQAIVWGGPQEQAELNHEQLLRAGLTMAPLEPEGS

SEQ ID NO: 8338 - protein, 95 aa, Thermosynechococcus elongatus
ASVVPPERQQVTRKHYPNYKVIVLNDDFNTFRHVAACLMKYIPNMTSDRAWELTNQVHYEGQAIVWVGPQEQAELYHEQLLRTGLTMAPLEPEGS

SEQ ID NO: 8339 - protein, 95 aa, Thermosynechococcus elongatus
ASVVPPEGQQVTRKHYPNYKVIVLNDDFNTFQHVVACLKKYIPNMISDRAWELTNQVHYGGRAIVWVGPQEQAELYHEQLLRAGLTMAPLEPEGS

SEQ ID NO: 8340 - protein, 95 aa, Thermosynechococcus elongatus
ASVVPPEGQQVTRKHYPNYKVIVLNDDFNTFQHVVACLKKYIPNMISDRAWELTNQVHYGGRAIVWVGPQEQAELYHEQLLRAGLTMAPLVPEGS

SEQ ID NO: 8341 - protein, 95 aa, Thermosynechococcus elongatus
ASVVPPEGQQVTRKHYPNYKVIVLNDDFNTFRHVAACLMKYIPNMTSDRAWELTNQVHYEGQAIVWVGPQEQAELYHEQLLRAGLTMAPLEPEGS

SEQ ID NO: 8342 - protein, 95 aa, Thermosynechococcus elongatus
ASVVPRERQQVARKHYPNYKVIVLNDDFNTYRHVAACLMKYIPNMTSDRAWELTNQVHYEAQAIVWVGPQVQAELYHEQLLRAGLTMAPLVPGGS

SEQ ID NO: 8343 - protein, 95 aa, Thermosynechococcus elongatus
ASVVPRERQQDTRKHYPNYKVIVLNDDFNTFRHVAACLMKYIPNKTSDRAWELTNQVHYEGQAIVWVGPQEQAELYHEQLLRAGLTMAPLEPEGS

SEQ ID NO: 8344 - protein, 95 aa, Thermosynechococcus elongatus
ASVVPRERQQDTRKHYPNYKVIVLNDDFNTFRHVAACLMKYIPNKTFDRAWELTNQVHYEGQAIVWVGPQVQAELYHEQLLRAGLTMAPLEPEGS

SEQ ID NO: 8345 - protein, 95 aa, Thermosynechococcus elongatus
ASVVPRERQQDTRKHYPNYKVIVLNDDFNTFRHVAACLMKYIPNMTSDRDWELTNQVHYEGQAIVWVGPQEQAELYHEQLLRAGLTMAPLEPEGS

SEQ ID NO: 8346 - protein, 95 aa, Thermosynechococcus elongatus
ASVVPRERQQDTRKHYPNYKVIVLNDDFNTFRHVAACLMKYIPNMTSDRAWELTNQVHYEGQAIVWVGPQEQAELYHEQLLRAGLTMAPLEPEGS

SEQ ID NO: 8347 - protein, 90 aa, Thermosynechococcus elongatus
ASVVPRERQQDTRKHYPNYKVIVLNDDFNTFRHVAACLMKYIPNMTSDRAWELTNQVHYEGQAIVWVGPQEQAELYHEQLLRAGLTMAPL

SEQ ID NO: 8348 - protein, 95 aa, Thermosynechococcus elongatus
ASVVPRERQQDTRKHYPNYKVIVLNDDFNTFRHVAACLMKYIPNMTSDRAWELTNQVHYEGQAIVWVGPQVQAELYHEQLLRAGLTMAPLEPEGS

SEQ ID NO: 8349 - protein, 95 aa, Thermosynechococcus elongatus
ASVVPRERQQDTRKHYPNYKVMVLNDDFNTFRHVAACLMKYIPNMTSDRAWELTNQVHYEGQAIVWVGPQEQAELYHEQLLRAGLTMAPLEPEGS

SEQ ID NO: 8350 - protein, 95 aa, Thermosynechococcus elongatus
ASVVPRERQQVTRKHYPNYKVIVLNDDFNTFQHVVACLKKYIPNMTSDRAWELTNQVHYEGQAIVWVGPQEQAELYHEQLLSAGLTMAPLEPEGS

SEQ ID NO: 8351 - protein, 95 aa, Thermosynechococcus elongatus
ASVVPRERQQVTRKHYPNYKVIVLNDDFNTFRHVAACLMKYIPNMTSDRAWDLTNQVHYKGQAIVRVGPQEQAELYHEQLLRAGLTMAPLEPEGS

SEQ ID NO: 8352 - protein, 95 aa, Thermosynechococcus elongatus
ASVVPRERQQFTRKHYPNYKVIVLNDDYNTFRHDAACLMKYIPNMTSDRAWDLTNQLHYKGQAIVWVGPQEQAELNHEQLLRAGLTMAPLEPEGS

SEQ ID NO: 8353 - protein, 95 aa, Thermosynechococcus elongatus
ASVVPREGQQVTRKHYPNYKVIVLNDDFNTFRHVSACLMKYIPNMTSDRAWELTNQVHYKGQAIVWVGPQEQAELNHEQLLRAGLTMAPLEPEGS

SEQ ID NO: 8354 - protein, 95 aa, Thermosynechococcus elongatus
ASVVPREGQQVTRKHYPNYKVIVLNYYFNNFRHVAACLMKYIPNMTSDRAWELTNQVHYKGLAIVWVGPQEQAELNHEQLLRAGLTMAPLEPEGS

SEQ ID NO: 8355 - protein, 95 aa, Thermosynechococcus elongatus
ASVVPREGQQVTRKHYPNYKVIVLNDDFNTFRHVAACLMKYIPNKTSDRAWELTNQVHYEGQAIVWVGPQEQAELYHEQLLRAGLTMAPLEPEGS

SEQ ID NO: 8356 - protein, 95 aa, Thermosynechococcus elongatus
ASVVPREGQQVTRKHYPNYKVIVLNDDFNTFRHVAACLMKYIPNMTSDRAWELTNQVHYEGQAIVWVGPQEQAELYHEQLLRAGLTMAPLEPGGS

SEQ ID NO: 8357 - protein, 95 aa, Thermosynechococcus elongatus
ASVVPRERQQDTRKHYPNYKVIVLNDDFNTFRHVAACLMKYIPNKTSDRAWDLTNQVHYEGQAIVWVGPQVHADLYHEQLLRAGLTLAPLEPGGS

SEQ ID NO: 8358 - protein, 18 aa, Thermosynechococcus elongatus
ASVVPLERQQVARKHYPN

SEQ ID NO: 8359 - protein, 95 aa, Thermosynechococcus elongatus
ASVVPLERQQDTRKHYPNYKVIVLNDDFNTFQHVVACLKKYIPNMISDRAWELTNLVHYGGRAIVCVGPQEQAELYHEQLLRAGLTMAPLEPEGS

SEQ ID NO: 8360 - protein, 95 aa, Thermosynechococcus elongatus
ASVVPLERQQDTRKHYPNYKVIVLNDDFNTFRHVAACLMKYIPNKTSDRAWDLTNQVHYEGQAIVWVGPQVQAELYHEQWLRAGLTMAPLEPEGS

SEQ ID NO: 8361 - protein, 95 aa, Thermosynechococcus elongatus
ASVVPLERQQVTRKHYPNYKVIVLNDDFNTFRHVAACLMKYIPNMTSDRAWELTNQVHYEGQAIVWVGPQEQAELYHEQLVRAGLTMAPLEPEGS

SEQ ID NO: 8362 - protein, 95 aa, Thermosynechococcus elongatus
ASVVPLERQQDTRKHYPNYKVIVLNDDFNTFRHVAACLMKYIPNMTSDRARELTNQVHYAGQAIVWVGPQEPAELYHEQLLRAGLTLAPMEPEGS

SEQ ID NO: 8363 - protein, 95 aa, Thermosynechococcus elongatus
ASVVPEERQQDTRKHYPNYKVIVLNDDFNTFRHVAACLMKYIPNMTSDRAWELTNQVHYGGRAIVWVGPQEQAELYHEQLLRAGLTMAPLEPEGS

SEQ ID NO: 8364 - protein, 5 aa, Thermosynechococcus elongatus
ASVVP

SEQ ID NO: 8365 - protein, 5 aa, Thermosynechococcus elongatus
ASVVP

SEQ ID NO: 8366 - protein, 5 aa, Thermosynechococcus elongatus
ASVVP

SEQ ID NO: 8367 - protein, 95 aa, Thermosynechococcus elongatus; identical to SEQ ID NO: 3

SEQ ID NO: 8368 - protein, 95 aa, Thermosynechococcus elongatus; identical to SEQ ID NO: 2

SEQ ID NO: 8369 - protein, 95 aa, Thermosynechococcus elongatus
ASVVPQERQQDTRKHYPNYQDIVLNDDFNTFRHVAACLMKYIPNMTSDRAWELTNPVHYKGQAIVWVCPQEQAELNHEQLLRACLTMAPLEPEGS

SEQ ID NO: 8370 - protein, 95 aa, Thermosynechococcus elongatus
ASVVPQEGQQVTRKHYPNYKVIVLNDDFNTFRHVAACLMKYIPNMTSDRALELTNQVHYKGQAIVWVGPQEQAELNHEQLLRAGLTMAPLEPEGS

SEQ ID NO: 8371 - protein, 95 aa, Thermosynechococcus elongatus
ASVVPQERQQVARKHYPNYKVIVLNDDFNTIRHVAACLMKYIPNMTSDRAWELTNQVHYEGQAIVWVGPQVQAVLYHDQLLRAGLTMAPLEPGGS

SEQ ID NO: 8372 - protein, 95 aa, Thermosynechococcus elongatus; identical to SEQ ID NO: 534

SEQ ID NO: 8373 - protein, 95 aa, Thermosynechococcus elongatus
ASVVPQERQQVARKHYPNYKVIVLNDDFNTFRHVAACLMTYIPIMTSDRAWELTNQVHYDGQAIVWVGPQVPAELSHEQLLRAGLTMAPLEPGGS

SEQ ID NO: 8374 - protein, 95 aa, Thermosynechococcus elongatus
ASVVPQERHQVARKHYPNSKVIVLNDDFNTFRHVAACLMNYIPNMTSDRAWELTNQVHYEGQAIVWVGPQVQAELYHEQLLRAGLTMAPLEPGGS

SEQ ID NO: 8375 - protein, 58 aa, Thermosynechococcus elongatus
ASVVPQERQQDTRKHYPNYKDIVLNDDFNTFRHDAACLMKYIPNMTSDRAWELTNQVH

SEQ ID NO: 8376 - protein, 95 aa, Thermosynechococcus elongatus
ASVVPQERQQDTRKHYPNYKVIVLNDDFNTYRHVAACLMKYIPNMTSDRAWELTNQVHYEGQAIVLVGPQEQAELYHELLLRAGLTMAPLEPEGS

SEQ ID NO: 8377 - protein, 95 aa, Thermosynechococcus elongatus; identical to SEQ ID NO: 44

SEQ ID NO: 8378 - protein, 95 aa, Thermosynechococcus elongatus
ASVVPQERQQDTRKHYPNYKVIVLNDDFNTFRHVAACLMKYIPNKTSDRAWELTNQVHYEGQAIVWVGPQEQAEIYHEQLLRAGLTMAPLEPEGS

SEQ ID NO: 8379 - protein, 95 aa, Thermosynechococcus elongatus; identical to SEQ ID NO: 2

SEQ ID NO: 8380 - protein, 95 aa, Thermosynechococcus elongatus
ASVVPQERQQDTRKHYPNYKVIVLNDDFNTFRHVAACLMKYIPNMTSDRAWELTNQVHYEGQAIVWVGPQEQAELYHEPLLRAGLTMAPLEPEGS

SEQ ID NO: 8381 - protein, 95 aa, Thermosynechococcus elongatus; identical to SEQ ID NO: 579

SEQ ID NO: 8382 - protein, 95 aa, Thermosynechococcus elongatus
ASVVPQERQQDTRKHYPNYKVIVLNDDFNSFRHVAACLMKYIPIMTSDRAWELTNHVHYEGHAIVWDGPQAQAELYPEHLSRAGLTMAPLEPEGS

SEQ ID NO: 8383 - protein, 95 aa, Thermosynechococcus elongatus
ASVVPQERQQDTRKHYPNYKVIVLNDDFNSFRHVAACLMKYIPNKTSDRAWELTNQVHYEGQAIVWVGPQEPAELYHEQLLRAGLTMAPLEPEGS

SEQ ID NO: 8384 - protein, 95 aa, Thermosynechococcus elongatus; identical to SEQ ID NO: 250

SEQ ID NO: 8385 - protein, 95 aa, Thermosynechococcus elongatus; identical to SEQ ID NO: 5

SEQ ID NO: 8386 - protein, 95 aa, Thermosynechococcus elongatus; identical to SEQ ID NO: 5

SEQ ID NO: 8387 - protein, 95 aa, Thermosynechococcus elongatus; identical to SEQ ID NO: 201

SEQ ID NO: 8388 - protein, 95 aa, Thermosynechococcus elongatus
ASVVPQEGQQVTRKHYPNYKEIVLNDDFNTFQHFVACLKKYIPNMISDRAWELTNQVHYGGRAIVWVGPHEQAELYHEQLLRAGLTMAPLEPEGS

SEQ ID NO: 8389 - protein, 95 aa, Thermosynechococcus elongatus
ASVVPQEGQQVTRKHYPNYKDIVLNDDFNTFRHVAASLMKYIPNMTSDRAWELTNQVHFEGLAIVWVGPQEQAELYHEQLLRAGLTLAPLDPGGS

SEQ ID NO: 8390 - protein, 95 aa, Thermosynechococcus elongatus
ASVVPQEGQQVTRKHYPNYKVIVLNDDFNTFQHDAACLMKYIPNMISDRACELTNQVHYGGRAIVWVGPQEQAELYQEQLLRAGLTMAPLEPEGS

SEQ ID NO: 8391 - protein, 59 aa, Thermosynechococcus elongatus
ASVVPQEGQQVTRKHYPNYKVIVLNDDFNTIQHVVACLKKYIPNMISDRAWELTNQVLF

SEQ ID NO: 8392 - protein, 77 aa, Thermosynechococcus elongatus
ASVVPQEGQQVTRKHYPNYKVIVLNDDFNTFQHVVACLKKYIPNMISDRAWELTNQVHYGGRAIVWVGPQEQAELFH

SEQ ID NO: 8393 - protein, 95 aa, Thermosynechococcus elongatus; identical to SEQ ID NO: 271

SEQ ID NO: 8394 - protein, 95 aa, Thermosynechococcus elongatus; identical to SEQ ID NO: 1

SEQ ID NO: 8395 - protein, 95 aa, Thermosynechococcus elongatus; identical to SEQ ID NO: 22

SEQ ID NO: 8396 - protein, 95 aa, Thermosynechococcus elongatus
ASVVPQEGQQVTRKHYPNYKVIVLNDDFNTFQHVVACLKKYIPNMISDRAWELTNQVHYGGQAIVWVGPQEQAELYPEQLWRAGLPMAPLEPEGS

SEQ ID NO: 8397 - protein, 95 aa, Thermosynechococcus elongatus; identical to SEQ ID NO: 49

SEQ ID NO: 8398 - protein, 95 aa, Thermosynechococcus elongatus; identical to SEQ ID NO: 617

SEQ ID NO: 8399 - protein, 95 aa, Thermosynechococcus elongatus
ASVVPQEGQQVTRKHYPNYKVIVLNDDFNTFQHVVACLKKYIPNMISDRAWELTNQVHYGCRDIVCVGPQEQDELYHELLLRAGLTMAPLEPEGS

SEQ ID NO: 8400 - protein, 95 aa, Thermosynechococcus elongatus
ASVVPQEGQQVTRKHYPNYKVIVLNDDFNTFQHVVAFLKKYIPNMMSDRAWELTNQVHYGGRAIVWVGPQEQAELYHEQLLRAGLTMAPLEPEGS

SEQ ID NO: 8401 - protein, 95 aa, Thermosynechococcus elongatus
ASVVPQEGQQVTRKHYPNYKVIVLNDDFNTFRHVAACLMKYIPNMTSDRAWELTNHVHYEGQAIVWVGPREQAELYHEQLLRVGLTMAPLEPEGS

SEQ ID NO: 8402 - protein, 95 aa, Thermosynechococcus elongatus; identical to SEQ ID NO: 17

SEQ ID NO: 8403 - protein, 95 aa, Thermosynechococcus elongatus
ASVVPQEGQQVTRKHSPNYKVIVLNDDFNTVQHVVACLKKYIPNMISDRAWELTNQVHYGGRAIVWVGPQEQAELYHEQLLRAGLTMAPLEPEGS

SEQ ID NO: 8404 - protein, 95 aa, Thermosynechococcus elongatus
ASVVPQEGQQVTRKHYPNYKVIVLNDDFNTFKHVVECLKKYIPNMISDRAWELTNQVHYEGQAIVWVGPQEQAELYHEQLLRAGLTMAPLEPEGS

SEQ ID NO: 8405 - protein, 52 aa, Thermosynechococcus elongatus
ASVVPQERQQVARKHYPNYKVIVLNDDFNTFRHVAACVMKYIPPLTSDRAWD

SEQ ID NO: 8406 - protein, 95 aa, Thermosynechococcus elongatus
ASVVPQERQQVARKHYPNYKVIVLNDDFNTFRHVAACWMKYIPNMTSDRAWELTNQVHSEGQAIVWVGPHVQADLYHDHLLRAGLTMAPLEPGGS

SEQ ID NO: 8407 - protein, 95 aa, Thermosynechococcus elongatus
ASVVPQERQQETRKHYPNYRVIVLNDDFNTFRHVAARLMKYIPNMTSDRAWELTNQVHYEGQAIVWVGPQEQAELDHEQLLRAGLTMAPLEPEGS

SEQ ID NO: 8408 - protein, 95 aa, Thermosynechococcus elongatus
ASVVPQEGQQVTRKHYPNYKVRVLNDDFNTFQHVVACVKKYIPNMISDRAWELTNQVHYGGRAIVWVGPQEQAELYHEQLLRAGLTRAPLEPEGS

SEQ ID NO: 8409 - protein, 95 aa, Thermosynechococcus elongatus; identical to SEQ ID NO: 13

SEQ ID NO: 8410 - protein, 95 aa, Thermosynechococcus elongatus; identical to SEQ ID NO: 222

SEQ ID NO: 8411 - protein, 95 aa, Thermosynechococcus elongatus
ASVVRQERQQDTRKHYPNYKVIVLNDDFNTFRHVAACLMKYIPNMTSDRAWELTNQVHYEGQAIVWVGPQEQAELYHEQLLRAGLTMAPLEPEGS

SEQ ID NO: 8412 - protein, 95 aa, Thermosynechococcus elongatus
ASVVLQERQQVARKHYPNYKVIVLNDDFNTFRHVAACLMKYIPNMTSDRAWELTNQVHYEGQAIVWVGPQVQAELYHEQLLRAGLTMAPLEPEGS

SEQ ID NO: 8413 - protein, 95 aa, Thermosynechococcus elongatus
ASVVLQERQQDTRKHYPNYKVIVLNDDFNTFRHVAACLMKYIPNMTSDRAWELTNQVHYEGQAIVWVGPQVQAELYHEQLLRAGLTMAPLEPGGS

SEQ ID NO: 8414 - protein, 95 aa, Thermosynechococcus elongatus
ASVVLQEGQQVTRKHHPNYKVIVLNDDFNTFRHVAACLMKYIPNMTSDRAWELTNQVHYEGQAIVWVGPQEQAELYHEQLLRAGLTMAPLEPEGS

SEQ ID NO: 8415 - protein, 95 aa, Thermosynechococcus elongatus
ASVVLQEGQQVTRKHYPNYKVIVLNDDFNTFQHVVACLKKYIPNMTSDRAWELTNQVHYEGQAIVRVGPQEQAELYHKQLLRAGLTMAPLEPEGS

SEQ ID NO: 8416 - protein, 95 aa, Thermosynechococcus elongatus
ASVVLQEGQQVTRKHYPNYKVIVLNDDFNTFQHVVACLKKYIPNMISDRAWELTNQVHYEGQAIVWVGPQVQAELYHEQLLRAGLTMAPLEPGGS

SEQ ID NO: 8417 - protein, 95 aa, Thermosynechococcus elongatus
ASVVAQERQQVARKHYPNYKVIVLNDDFNTFRHVAACLMKYIPNMTSDRAWELTNQVHYEGQAIVWVGPQVQAELYHEQLLRAGLTMAPLEPEGS

SEQ ID NO: 8418 - protein, 95 aa, Thermosynechococcus elongatus
ASVVSQERQQVARKHYPNYKVIVLNDDFNTFRHVAACLMKYIPNMISDRAWELTNQVHYGGRAIVWVGPQEQAELYHEQLLRAGLTMAPLEPGGS

SEQ ID NO: 8419 - protein, 95 aa, Thermosynechococcus elongatus
ASVVSQERQQDTRKHYPNYKVIVLNDDFNTFRHVAACLMKYIPNMTSDRAWELTNQVHYEGQAIVWVGPQEQAELYHEQLLRAGLTMAPLEPEGS

SEQ ID NO: 8420 - protein, 95 aa, Thermosynechococcus elongatus
ASVVSQEGQQVTRKHYPNYKVIVLNDDFNTFQHVVACLKKYIPNMISDRAWELTNQVHYGGRAIVWVGPQEQAELYHEQLLRAGLTMAPLEPEGS

SEQ ID NO: 8421 - protein, 95 aa, Thermosynechococcus elongatus
ASVVSQEGQQVTRKHYPNYKVIVLNDDFNTFRHVAACLMKYIPNKTSDRAWELTNQVHYEGQAIVWVGPQEQAELYHEQLLRAGLTMAPLEPEGS

SEQ ID NO: 8422 - protein, 95 aa, Thermosynechococcus elongatus
ASVVLQERQQDTRKHYPNYKVIVLNDDFNTFQHVAACLMKYIPNMTSDRAWELTNQVHYEGQAIVRVGPQEQAELYHKQLLRAGLTMAPLEPEGS

SEQ ID NO: 8423 - protein, 95 aa, Thermosynechococcus elongatus
ASVVLQERQQDTRKHYPNYKVIVLNDDFNTFRHVAACLMKYIPNMTSDRAWELTNQVHYEGQAIVWVGPQEQAELYHEQLLRAGLTMAPLEPEGS

SEQ ID NO: 8424 - protein, 95 aa, Thermosynechococcus elongatus
ASVVLQERQQDTRKHYPNYKVIVLNDDFNTFRHVAACLMKYIPNMTSDRAWELTNQVHYKGQAIVWVGPQEQAELNHEQLLRAGLTMAPLEPEGS

SEQ ID NO: 8425 - protein, 95 aa, Thermosynechococcus elongatus
ASVVLQERQQVTRKHYPNYKVIVLNDDFNTFQHVVACLKKYIPNMISDRAWELTNQVHYGGRAIVWVGPQEQAELYHEQLLRAGLTMAPLEPEGS

SEQ ID NO: 8426 - protein, 95 aa, Thermosynechococcus elongatus
ASVVPQERQQVARKHYPNYKVIVLNDDFNTFRHVAACLMKYIPNMTSDRAWELTNQVHYEGQAIVWVGPHVQAELYHEQLLRAGLTMAPLEPGGS

SEQ ID NO: 8427 - protein, 95 aa, Thermosynechococcus elongatus
ASVVPQERQQDTRKHYPNYKVRVLNDDFNTVRHVAACLMKYIPNMTSDRAWELTNQVHYEGQAIVWVGPQEQAELYHEQLLRAGLTMAPLEPEGS

SEQ ID NO: 8428 - protein, 95 aa, Thermosynechococcus elongatus; identical to SEQ ID NO: 2

SEQ ID NO: 8429 - protein, 95 aa, Thermosynechococcus elongatus; identical to SEQ ID NO: 1001

SEQ ID NO: 8430 - protein, 95 aa, Thermosynechococcus elongatus; identical to SEQ ID NO: 5

SEQ ID NO: 8431 - protein, 61 aa, Thermosynechococcus elongatus; identical to SEQ ID NO: 820

SEQ ID NO: 8432 - protein, 95 aa, Thermosynechococcus elongatus; identical to SEQ ID NO: 54

SEQ ID NO: 8433 - protein, 95 aa, Thermosynechococcus elongatus
ASVVPQERQQVARKHYPNYKVIVLNYDFNTFRHVAACLMKYIPNMTSDRAWELTNQVHYEGQAIVWVGPQVQAELYHEQLLRAGLTMAPLEPEGS

SEQ ID NO: 8434 - protein, 95 aa, Thermosynechococcus elongatus; identical to SEQ ID NO: 15

SEQ ID NO: 8435 - protein, 95 aa, Thermosynechococcus elongatus; identical to SEQ ID NO: 5

SEQ ID NO: 8436 - protein, 95 aa, Thermosynechococcus elongatus; identical to SEQ ID NO: 301

SEQ ID NO: 8437 - protein, 95 aa, Thermosynechococcus elongatus; identical to SEQ ID NO: 7364

SEQ ID NO: 8438 - protein, 95 aa, Thermosynechococcus elongatus
ASVVPQERQQVARKHYPNYKVIVLNDDFNTFRHVAACLMKYIPNMTSDRAWELTNQVHYEGQAIVWVGPQVQAGLYHEQLLRAGLTMAPLEPGGS

SEQ ID NO: 8439 - protein, 95 aa, Thermosynechococcus elongatus; identical to SEQ ID NO: 38

SEQ ID NO: 8440 - protein, 95 aa, Thermosynechococcus elongatus
ASVVPQERQQVTRKHYPNYKVIVLNDDFNTFQHVAACLMKYIPNMTSDRAWELTNQVHYEGQAIVWVGPQEQAELYHEQLLRAGLIMAPLEPEGS

SEQ ID NO: 8441 - protein, 95 aa, Thermosynechococcus elongatus
ASVLTQERQQDTRKHYPNYKVIVLNDDFNTFRHVAACLMKYIPNMTSDRAWELTNQVHYEGQAIVWVGPQVQAELYHEQLLRAGLTMAPLEPGGS

SEQ ID NO: 8442 - protein, 95 aa, Thermosynechococcus elongatus
ASVLQQEGQQVTRKHYPNYKEIVLNDDFNTFQHVDACLKKYIPNMISDRAWELTNQVHYGGRAIVWVGPQEQAELDHEQLLSAGLTMAPLEPEGS

SEQ ID NO: 8443 - protein, 95 aa, Thermosynechococcus elongatus
ASVLPQKRQQVARKHNPNYKVIVLNDDFNTFRHVAACLMKYIPNMTSDRAWELTNQVHYEGQAIVWVGPQVQAELYHEQLLRAGLTMAPLEPGGS

SEQ ID NO: 8444 - protein, 95 aa, Thermosynechococcus elongatus
ASVLPQERQQVARKHYPNYKVIVLNDDFNTFRHVAACLMKYIPNMTSDRAWELTNQVHYEGQAIVWVGPQVQAELYHELLLRAGLTRAPLEPGGS

SEQ ID NO: 8445 - protein, 95 aa, Thermosynechococcus elongatus
ASVLPQERQQDNRKHYPKYKVIVLKDDLNNLRNVAACLMKYIPNMTSDRAWELTNQVHYEGQAIVWVGPQVQAELYHEQLLRAGLTIAPLEPGGS

SEQ ID NO: 8446 - protein, 95 aa, Thermosynechococcus elongatus
ASVLPQERQQDTRKHYPNYKVIILNDDFNTFQHVAACLMKYIPNMTSDRAWELTNQVHYEGQAIVRVGPQEQAELYHKQLLRAGLTMAPLEPEGS

SEQ ID NO: 8447 - protein, 95 aa, Thermosynechococcus elongatus
ASVLPQERQQDTRKHYPNYKVIVLNDDFNTFRHVAASLMKYIPNMTSDRAWELTKHVHYVGLAIVWVGPQVQAELYHVQLLRAGLTMAPLDPGGS

SEQ ID NO: 8448 - protein, 95 aa, Thermosynechococcus elongatus
ASVLPQERQQDTRKHYPNYKVIVLNDDFNTFRHVAACLMKYIPNMTSDRAWELTNQVHYEGQAIVWVGPQEQAELYHEQLLRAGLTMAPLEPGGS

SEQ ID NO: 8449 - protein, 95 aa, Thermosynechococcus elongatus
ASVLPQERQQDTRKHYPNYKVIVLNDDFNTFRHVAACLMKYIPNMTSDRAWELTNQVHYEGQAIVWVGPQVQAELYHEQLLRAGLTMAPLEPGGS

SEQ ID NO: 8450 - protein, 95 aa, Thermosynechococcus elongatus
ASVLPQERQQDTRNHYPNYNVIFFNDDFKTLQHFDACLMKYIPNMTSDRAWELTNQVHYEGQAIVWVGPQVQAELYHEQLLRAGLTMAPLEPGGS

SEQ ID NO: 8451 - protein, 95 aa, Thermosynechococcus elongatus
ASVLPQEGQQVTRKHYPNYKVIVLNDDFNTFRHVAACLMKYIPNKTSDRAWELTNQVHYEGQAIVWVGPQEQAELYHEQLLRAGLTMAPLEPEGS

SEQ ID NO: 8452 - protein, 6 aa, Thermosynechococcus elongatus
ASVLPQ

SEQ ID NO: 8453 - protein, 95 aa, Thermosynechococcus elongatus
ASFEPQERQQDTRKHYPNYKVIVLNDDFNTFRHVAACLMKYIPNKTSDRAWELTNQVHYEGQAIVWVGPQEQAELYHEQLLRAGLTMAPLEPEGS

SEQ ID NO: 8454 - protein, 95 aa, Thermosynechococcus elongatus
ASFVPQQRQQDTKKHNPNYKDIDMNDDINTYRHVAACLMKYIPNMTSDRAWELTNQVHYEGQAIVWVGPQEQAELYHEQLLRAGLTMAPLEPEGS

SEQ ID NO: 8455 - protein, 95 aa, Thermosynechococcus elongatus
ASFVPQERQQDTRKHYPNYKVIVLNDDYNTFRHFAASLMKYIPNKTSDRAWELTNQVHYGGRAIVWVGPQEQAELYHEHLLRAGLTMAPLVPVGS

SEQ ID NO: 8456 - protein, 58 aa, Thermosynechococcus elongatus
ASFVPQERQQDTRKHYPNYKVIVLNDDFNTFRHVAACLMKYIPNKTSDRAWELTNQVH

SEQ ID NO: 8457 - protein, 95 aa, Thermosynechococcus elongatus
ASFVPQERQQDTRKHYPNYKVIVLNDDFNTFRHVAACLMKYIPNMTSDRAWELTNQVHYEGQAIVWVGPQEQAELDHEQLLRAGLTLAPLEPEGS

SEQ ID NO: 8458 - protein, 95 aa, Thermosynechococcus elongatus
ASFVPQERQQDTRKHYPNYKVIVLNDDFNTFRHVAACLMKYIPNMTSDRAWELTNQVHYEGQAIVWVGPQVQAELYHEQLLRAGLTMAPLEPGGS

SEQ ID NO: 8459 - protein, 95 aa, Thermosynechococcus elongatus
ASFVPQERQQVTRKHYPNYKVIVLNDDFNTFRHVAACLMKYIPNKTSDRAWELTNQVHYVGQAIVWVGPQEQAELYHEQLLRAGLTMAPLEPEGS

SEQ ID NO: 8460 - protein, 36 aa, Thermosynechococcus elongatus
ASFVPQERQQVTRKHYPNYKVIVLNDDFNTFRHVDA

SEQ ID NO: 8461 - protein, 95 aa, Thermosynechococcus elongatus
ASFVPQERQQVARKHYPNYKVIVLNDDFNTFQHVAACLMKYIPNMTSDRAWELTNQVHYVGQAIVWVGPQEQAELYHEQLLRAGLTMAPLEPKGS

SEQ ID NO: 8462 - protein, 95 aa, Thermosynechococcus elongatus
ASFVPQVGQQVTRKHYPNYKVIVLNDDFNTFQHVVACLKKYIPNMISDRAWELTNQVHYGGRAIVWVGPQEQAELYHEQLLRAGLTMAPLEPEGS

SEQ ID NO: 8463 - protein, 95 aa, Thermosynechococcus elongatus
ARVVPQERQQVTRKHYPNYKVIVLNDDFNTFRHVAACLMKYIPNMTSDRAWELTNQVHYEGQAIVWVGPQEQAELYHEQLLRTGLTMAPLEPEGS

SEQ ID NO: 8464 - protein, 95 aa, Thermosynechococcus elongatus; identical to SEQ ID NO: 96

SEQ ID NO: 8465 - protein, 95 aa, Thermosynechococcus elongatus; identical to SEQ ID NO: 3

SEQ ID NO: 8466 - protein, 95 aa, Thermosynechococcus elongatus
ASVVPQERQQDTRKHYPNYKDIVLNYDFNTYRHVAACLMKYIPNKTSDRDWELTNQVHYEGLAIVWVGPQEQAELYHEQLLSAGLTMAQLEPEGS

SEQ ID NO: 8467 - protein, 95 aa, Thermosynechococcus elongatus; identical to SEQ ID NO: 7
